(19) United States
(12) Patent Application Publication
(10) Pub. No.: US 2010/0104568 A1
(43) Pub. Date: Apr. 29, 2010

(54) AMINO ACID SEQUENCES DIRECTED AGAINST RANK-L AND POLYPEPTIDES COMPRISING THE SAME FOR THE TREATMENT OF BONE DISEASES AND DISORDERS

(75) Inventors: Els Anna Alice Beirnaert, Bellem (BE); Sigrid Cornelis, St. Martens-Latem (BE); Hendricus Renerus Jacobus Mattheus Hoogenboom, Maastricht (NL)

Correspondence Address: WOLF GREENFIELD & SACKS, P.C., 600 ATLANTIC AVENUE, BOSTON, MA, 02210-2206, US

(73) Assignee: Ablynx N.V., Ghent-Zwijnaarde (BE)

(21) Appl. No.: 12/558,032

(22) Filed: Sep. 11, 2009

Related U.S. Application Data
(63) Continuation-in-part of application No. PCT/EP2008/056383, filed on May 23, 2008.
(60) Provisional application No. 60/939,929, filed on May 24, 2007.
(60) Provisional application No. 61/024,256, filed on Jan. 29, 2008.

(51) Int. Cl. A61K 39/395; C07K 14/00; C07K 16/00; C07H 21/04; C12N 5/16; A61K 38/16; C12P 21/06

(52) U.S. Cl. 424/133.1; 530/350; 530/387.1; 530/387.3; 536/23.1; 536/23.53; 435/326; 514/12; 435/69.7; 435/69.6

(57) ABSTRACT

The present invention relates to amino acid sequences that are directed against RANK-L, as well as to compounds or constructs, and in particular proteins and polypeptides, that comprise or essentially consist of one or more such amino acid sequences. The invention also relates to nucleic acids encoding such amino acid sequences and polypeptides; to methods for preparing such amino acid sequences and polypeptides; to host cells expressing or capable of expressing such amino acid sequences or polypeptides; to compositions, and in particular to pharmaceutical compositions, that comprise such amino acid sequences, polypeptides, nucleic acids and/or host cells; and to uses of such amino acid sequences or polypeptides, nucleic acids, host cells and/or compositions, in particular for prophylactic, therapeutic or diagnostic purposes.

### RELATED APPLICATIONS

[0001] This application is a continuation-in-part of international application PCT/EP2008/056383, filed May 23, 2008, which was published under PCT Article 21(2) in English, which claims the benefit under 35 U.S.C. §119(e) of U.S. provisional application No. 60/939,929, filed May 24, 2007, and of U.S. provisional application No. 61/024,256, filed Jan. 29, 2008, each of which is incorporated by reference herein.

### FIELD OF THE INVENTION

[0002] The present invention relates to amino acid sequences that are directed against (as defined herein) Receptor Activator of Nuclear factor Kappa B Ligand (RANK-L, also called tumor necrosis factor-related, activation-induced cytokine (TRANCE), osteoclast differentiation factor (ODF), osteoprotegerin ligand (OPG-L) or tumor necrosis factor superfamily member 11 (TNFSF11)), as well as to compounds or constructs, and in particular proteins and polypeptides, that comprise or essentially consist of one or more such amino acid sequences (also referred to herein as “amino acid sequences of the invention”, “compounds of the invention”, and “polypeptides of the invention”, respectively).

[0003] The invention also relates to nucleic acids encoding such amino acid sequences and polypeptides (also referred to herein as “nucleic acids of the invention” or “nucleotide sequences of the invention”); to methods for preparing such amino acid sequences and polypeptides; to host cells expressing or capable of expressing such amino acid sequences or polypeptides; to compositions, and in particular to pharmaceutical compositions, that comprise such amino acid sequences, polypeptides, nucleic acids and/or host cells; and to uses of such amino acid sequences or polypeptides, nucleic acids, host cells and/or compositions, in particular for prophylactic, therapeutic or diagnostic purposes, such as the prophylactic, therapeutic or diagnostic purposes mentioned herein.

[0004] Other aspects, embodiments, advantages and applications of the invention will become clear from the further description herein.

### BACKGROUND OF THE INVENTION

[0005] Remodelling (turnover) of bone is the process by which the adult skeleton is continually being resorbed (removed) and formed (replaced). Bone remodeling involves the synthesis of bone matrix by osteoblasts and its resorption by osteoclast cells. Osteoclasts, derived from hematopoietic cells, are unique forms of tissue macrophages that have the capacity to resorb bone tissue. Osteoblasts are specialized fibroblasts that have the capacity of secreting bone collagen. There is an exquisite coordination among the activities of these bone cells that link the processes of bone formation and bone resorption.

[0006] Bone remodelling is controlled by a balance between RANK-L/RANK and the RANK-L decoy receptor OPG. RANK-L and its receptor RANK are essential for the development and activation of osteoclasts. OPG, a secreted protein, is an effective inhibitor of osteoclast maturation and osteoclasts activation. In normal bone homeostasis, RANK-L and OPG participate in a cytokine axis that tightly controls the generation of osteoclasts from monocyte precursors. RANK-L, expressed by osteoblasts and bone marrow stromal cells, binds to its functional receptor, RANK, to stimulate differentiation of osteoclasts from precursor cells and the proliferation and activity of mature osteoclasts. OPG, which is expressed by osteoblasts, stromal cells, dendritic cells, and megakaryocytes, limits this process by acting as a soluble decoy receptor for RANK-L.

[0007] The TNF family molecule RANK-L is encoded by a single gene (rankl) at human chromosome 13q14. RANK-L mRNA is expressed at highest levels in bone and bone marrow, as well as in lymphoid tissues (lymph node, thymus, spleen, fetal liver, and Peyer's patches) (Anderson et al. 1997, Nature 390: 175-179; Wong et al. 1997, J. Biol. Chem. 272: 25190-25194; Lacey et al. 1998, Cell 93: 165-176; Yasuda et al. 1998, Proc. Natl. Acad. Sci. USA 95: 3597-3602). Alternative splicing of RANK-L mRNA allows expression as a type II transmembrane glycoprotein of either 316 or 270 amino acids or as a soluble ligand of 243 amino acids (Kong et al. 1999, Nature 397: 315-323; Nagai et al. 2000, Biochem Biophys. Res. Commun. 269: 532-536). In addition, RANK-L can be released from its membrane bound state by metalloproteinases, including TNF-alpha convertase (Lum et al. 1999, J. Biol. Chem. 274: 13613-13618). All four isoforms of RANK-L associate into trimeric molecules capable of triggering osteoclastogenesis.

[0008] RANK (receptor activator of NFkappaB also known as TRANCE-R, ODAR, or TNFRSF11A), expressed on preosteoclastic cells, is the sole receptor on these cells for RANK-L (Li et al. 2000, Proc. Natl. Acad. Sci. USA 97: 1566-1571). RANK activation by RANK-L is followed by its interaction with TNF receptor-associated (TRAF) family members, activation of nuclear factor (NF)-kappaB and c-Fos, JNK, c-src, and the serine/threonine kinase Akt/PKB (Anderson et al. 1997, Nature 390: 175-179; Hsu et al. 1999, Proc. Acad. Sci. USA 96: 3540-3545).

[0009] OPG (osteoprotegerin; “protector of the bone”; also known as osteoclastogenesis inhibitory factor (OCIF)) is a soluble, 110-kDa, disulfide-linked, homodimeric glycoprotein produced and released by activated osteoblast cells (Simonet et al. 1997, Cell 89: 309-319) with homology to the TNF receptor family, that functions as a decoy receptor for RANK-L and competes with RANK for RANK-L binding. Consequently, OPG is an effective inhibitor of osteoclast maturation and osteoclast activation (Simonet et al. 1997, Cell 89: 309-319; Lacey et al. 1998, Cell 93: 165-176; Kong et al. 1999, Nature 397: 315-323), thereby reducing bone resorption.

[0010] A more detailed overview of the OPG/RANK-L/RANK system as the mediator of bone formation and destruction is presented in Khosla, (2001 Endocrinology 142: 5050-5055), Holstead Jones et al. (2002, Ann. Rheum. Dis. 61 (Suppl II): ii32-ii39), Bezerra et al. (2005, Brazilian J. Med. Biol. Res. 38: 161-170) and McClung (2006, Current Osteoporosis Reports 4: 28-33).

[0011] Several bone disorders occur when there is an imbalance between the resorption and formation components of bone remodeling activity (uncoupling of bone homeostasis).

[0012] Imbalances between osteoclast and osteoblast activities can arise from a wide variety of hormonal changes or perturbations of inflammatory and growth factors, such as e.g. an altered balance between OPG and RANK-L. When bone resorption is greater than bone formation, there is a net loss of bone over time. This can eventually result in low bone mass (osteopenia) or osteoporosis. When bone formation exceeds resorption, there is a net increase in bone mass (osteopetrosis).

[0013] Excessive bone loss or destruction due to higher RANK-L, lower OPG or both has been implicated in many disease states, including post-menopausal osteoporosis (Eghbali-Fatourechi et al. 2003, Journal of Clinical Investigation 111: 1221-1230; Tsangari et al. 2004, Bone 35: 334-342; Abdallah et al. 2005, Calcified Tissue International 76: 90-97), primary hyperparathyroidism (Stilgren et al. 2004, Bone 35: 256-265; Johnell et al. 2005, Journal of Bone and Mineral Research 20: 1185-1194), Paget's disease of bone (Reddy 2004, Journal of Cellular Biochemistry 93: 688-696), metastatic bone disease (Brown 2004, Cancer Treatment and Research 118: 149-172), myeloma (Okada et al. 2003, Clinical and Experimental Metastasis 20: 639-646), rheumatoid arthritis (Crotti et al. 2002, Annals of the Rheumatic Diseases 61: 1047-1054) and several other metabolic or inflammatory bone and joint disorders (Locklin et al. 2001, Bone 28 (Suppl.): S80; Lewiecki 2006, Expert Opin. Biol. Ther. 6: 1041-1050).

[0014] Pharmacological agents to decrease risk of fracture have been available for more than ten years. Anticatabolic drugs (oestrogens, bisphosphonates, calcitonin and selective oestrogen receptor modulators) decrease bone resorption, while anabolic agents, such as recombinant human parathyroid hormone (PTH), increase bone formation and bone size. The bisphosphonate class of drugs is the one most often used for the treatment of osteoporosis. Although this drug class is generally very safe, oral dosing is complex and has been associated with gastrointestinal adverse events in a small percentage of clinical practice patients. Clinical trials are evaluating increasing intervals of intravenous bisphosphonate dosing.

[0015] The recent discovery of the OPG/RANK-L/RANK system as pivotal regulatory factors in the pathogenesis of bone diseases and disorders like osteoporosis provides unique targets for therapeutic agents. In laboratory animals and in humans, administering forms of OPG markedly inhibited osteoclast activity and improved bone strength (Bekker et al. 2001, J. Bone Miner. Res. 16: 348-360; Campagnuolo et al. 2002, Arthritis Rheum. 46: 1926-1936; Bezerra et al. 2005, Brazilian J. Med. Biol. Res. 38: 161-170; McClung 2006, Current Osteoporosis Reports 4: 28-33). In early studies in humans, a fully human antibody against RANK-L (Denosumab) reduced bone turnover and improved bone density (Body et al. 2003, Cancer 97: 887-892; Bekker et al. 2004, J. Bone Miner. Res. 19: 1059-1066; McClung 2006, Current Osteoporosis Reports 4: 28-33; Lewiecki 2006, Expert Opin. Biol. Ther. 6: 1041-1050; McClung et al. 2006, N. Engl. J. Med. 354: 821-831). Such complete antibodies, however, face the drawbacks of full size antibodies such as high production costs, low stability, and their large size, which e.g. impedes their access to certain hidden epitopes.

### SUMMARY OF THE INVENTION

[0016] Nanobodies are more potent and more stable than conventional four-chain antibodies which leads to (1) lower dosage forms, less frequent dosage leading to less side effects; and (2) improved stability leading to a broader choice of administration routes, comprising oral or subcutaneous routes and slow-release formulations in addition to the intravenous route.

[0017] Because of their small size, Nanobodies have the ability to cross membranes and penetrate into physiological compartments, tissues and organs not accessible to other, larger polypeptides and proteins. Nanobodies might, for example, easily penetrate into the bone matrix making them suited for the treatment of bone diseases and disorders.

[0018] The small size of the Nanobody also makes them ideally suited for their engineering into multivalent or multispecific polypeptides. In contrast to full antibodies which can bind to only one subunit of the RANK-L trimer, bivalent or trivalent polypeptides (based on respectively two or three Nanobodies against RANK-L), will be able to bind on respectively 2 or 3 subunits of the trimeric RANK-L molecule and might be advantageous because of their higher potency.

[0019] The amino acid sequences, polypeptides and compositions of the present invention can generally be used to modulate, and in particular inhibit and/or prevent, binding of RANK-L to RANK, and thus to modulate, and in particular inhibit or prevent, the signalling that is mediated by RANK-L, RANK and/or OPG, to modulate the biological pathways in which RANK-L and/or RANK are involved, and/or to modulate the biological mechanisms, responses and effects associated with such signalling or these pathways. The binding of RANK-L to RANK and/or the signalling that is mediated by RANK-L, RANK and/or OPG may be inhibited and/or prevented by at least 1%, preferably at least 5%, such as at least 10% or at least 25%, for example by at least 50%, at least 60%, at least 70%, at least 80%, or 90% or more, compared to the binding of RANK-L to RANK and/or the signalling that is mediated by RANK-L, RANK and/or OPG under the same conditions but without the presence of the amino acid sequence, Nanobody or polypeptide of the invention.

[0020] In another aspect of the present invention, the amino acid sequences, polypeptides and compositions of the present invention can be used to modulate, and in particular inhibit and/or prevent, binding of RANK-L to OPG, and thus to modulate (inhibit and/or prevent or boost) the signalling that is mediated by RANK-L, RANK and/or OPG, to modulate the biological pathways in which RANK-L, RANK and/or OPG are involved, and/or to modulate the biological mechanisms, responses and effects associated with such signalling or these pathways. The amino acid sequences, polypeptides and compositions of the present invention may be agonist or antagonist of RANK-L and/or such signalling. They may inhibit RANK/RANK-L mediated signalling in the same way as OPG, or they may fully or partially prevent OPG from inhibiting RANK/RANK-L mediated signalling. The binding of RANK-L to OPG and/or the signalling that is mediated by RANK-L, RANK and/or OPG may be inhibited and/or prevented by at least 1%, preferably at least 5%, such as at least 10% or at least 25%, for example by at least 50%, at least 60%, at least 70%, at least 80%, or 90% or more, compared to the binding of RANK-L to OPG and/or the signalling that is mediated by RANK-L, RANK and/or OPG under the same conditions but without the presence of the amino acid sequence, Nanobody or polypeptide of the invention.

[0021] In another aspect of the present invention, the amino acid sequences, polypeptides and compositions of the invention can be used to modulate (inhibit and/or prevent or boost) the differentiation and/or proliferation of osteoclasts. The differentiation and/or proliferation of osteoclasts may be increased or decreased, respectively, by at least 1%, preferably at least 5%, such as at least 10% or at least 25%, for example by at least 50%, at least 60%, at least 70%, at least 80%, or 90% or more, compared to the differentiation and/or proliferation of osteoclasts under the same conditions but without the presence of the amino acid sequence, Nanobody or polypeptide of the invention.

[0022] In another aspect of the present invention, the amino acid sequences, polypeptides and compositions of the invention can be used to modulate bone remodelling. Bone remodelling may be modulated at least 1%, preferably at least 5%, such as at least 10% or at least 25%, for example by at least 50%, at least 60%, at least 70%, at least 80%, or 90% or more, compared to bone remodelling under the same conditions but without the presence of the amino acid sequence, Nanobody or polypeptide of the invention.

[0023] As such, the polypeptides and compositions of the present invention can be used for the prevention and treatment (as defined herein) of bone diseases and disorders. Generally, “bone diseases and disorders” can be defined as diseases and disorders that can be prevented and/or treated, respectively, by suitably administering to a subject in need thereof (i.e. having the disease or disorder or at least one symptom thereof and/or at risk of attracting or developing the disease or disorder) of either a polypeptide or composition of the invention (and in particular, of a pharmaceutically active amount thereof) and/or of a known active principle active against RANK-L or a biological pathway or mechanism in which RANK-L is involved (and in particular, of a pharmaceutically active amount thereof).

[0024] Bone diseases and disorders encompass diseases and disorders associated with the regulation of bone formation and resorption. Bone diseases and disorders characterized by a net bone loss (bone resorption exceeds bone formation) are also referred to as osteopenic disorders, including ostopenia, osteoporosis and osteolysis and are characterized by excessive and/or unwanted signaling mediated by RANK-L. The polypeptides and compositions of the present invention that modulate, and in particular inhibit and/or prevent, binding of RANK-L to RANK act as antagonist and will generally be used for the prevention and treatment (as defined herein) of bone diseases and disorders characterized by net bone loss. Also polypeptides and compositions of the present invention that modulate, and in particular inhibit and/or prevent, binding of RANK-L to OPG may act as antagonists and will generally be used for the prevention and treatment (as defined herein) of bone diseases and disorders characterized by net bone loss.

[0025] Bone diseases and disorders characterized by net increase in bone mass are referred to as osteopetrosis and are characterized by poor signaling mediated by RANK-L. The polypeptides and compositions of the present invention that modulate, and in particular inhibit and/or prevent, binding of RANK-L to OPG may act as agonists and will generally be used for the prevention and treatment (as defined herein) of bone diseases and disorders characterized by net increase in bone mass.

[0026] Examples of such bone diseases and disorders will be clear to the skilled person based on the disclosure herein, and for example include the following diseases and disorders: Osteoporosis (McClung 2006, Current Osteoporosis Reports 4: 28-33), including, but not limited to, primary osteoporosis, endocrine osteoporosis (including, but not limited to, hyperthyroidism, hyperparathyroidism (Anandarajah and Schwarz 2006, J. Cell Biochem. 97: 226-232), Cushing's syndrome, and acromegaly), hereditary and congenital forms of osteoporosis (including, but not limited to, osteogenesis imperfecta, homocystinuria, Menkes' syndrome, Riley-Day syndrome), osteoporosis due to immobilization of extremities, glucocorticoid-induced osteoporosis (Locklin et al. 2001, Bone 28 (Suppl.): S80; McClung 2006, Current Osteoporosis Reports 4: 28-33; Anandarajah and Schwarz 2006, J. Cell Biochem. 97: 226-232) and post-menopausal osteoporosis (McClung 2006, Current Osteoporosis Reports 4: 28-33); (Juvenile or Familial) Paget's disease (Cundy et al. 2002, Hum. Mol. Genet. 11: 2119-2127; Whyte et al. 2002, J. Bone Miner. Res. 17: 26-29; Whyte et al. 2002, N. Engl. J. Med. 347: 175-184; Johnson-Pais et al. 2003, J. Bone Miner Res. 18: 376-380; Anandarajah and Schwarz 2006, J. Cell Biochem. 97: 226-232; Anandarajah and Schwarz 2006, J. Cell Biochem. 97: 226-232); Osteomyelitis, i.e., an infectious lesion in bone, leading to bone loss; Hypercalcemia (Anandarajah and Schwarz 2006, J. Cell Biochem. 97: 226-232), including, but not limited to, hypercalcemia resulting from solid tumors (including, but not limited to, breast, lung and kidney) and hematologic malignancies (including, but not limited to, multiple myeloma (Sordillo and Pearse 2003, Cancer 97 (3 Suppl): 802-812; Vanderkerken et al. 2003, Cancer Res. 63: 287-289), lymphoma and leukemia), idiopathic hypercalcemia, and hypercalcemia associated with hyperthyroidism and renal function disorders; Bone loss, including but not limited to, osteopenia following surgery, osteopenia induced by steroid administration, osteopenia associated with disorders of the small and large intestine, and osteopenia associated with chronic hepatic and renal diseases; Osteonecrosis, i.e., bone cell death, including, but not limited to, osteonecrosis associated with traumatic injury, osteonecrosis associated with Gaucher's disease, osteonecrosis associated with sickle cell anemia, osteonecrosis associated with systemic lupus erythematosus, osteonecrosis associated with rheumatoid arthritis, osteonecrosis associated with periodontal disease, osteonecrosis associated with osteolytic metastasis, and osteonecrosis associated with other condition; Bone loss associated with arthritic disorders such as psoriatic arthritis, rheumatoid arthritis, loss of cartilage and joint erosion associated with rheumatoid arthritis (Bezerra et al. 2005, Brazilian Journal of Medical and Biological Research 38: 161-170; Anandarajah and Schwarz 2006, J. Cell Biochem. 97: 226-232); Arthritis (Bezerra et al. 2005, Brazilian Journal of Medical and Biological Research 38: 161-170), including inflammatory arthritis (McClung 2006, Current Osteoporosis Reports 4: 28-33), Collagen-induced arthritis (Bezerra et al. 2005, Brazilian Journal of Medical and Biological Research 38: 161-170); Periprosthetic osteolysis (McClung 2006, Current Osteoporosis Reports 4: 28-33; Anandarajah and Schwarz 2006, J. Cell Biochem. 97: 226-232); Cancer-related bone disease (McClung 2006, Current Osteoporosis Reports 4: 28-33); Bone loss associated with aromatase inhibitor therapy (Lewiecki 2006, Expert Opin. Biol. Ther. 6: 1041-1050); Bone loss associated with androgen deprivation therapy (Lewiecki 2006, Expert Opin. Biol. Ther. 6: 1041-1050); Bone loss associated bone metastasis; Bone loss associated with diseases having immune system involvement, such as adult and childhood leukaemias, cancer metastasis, autoimmunity, and various viral infections (Holstead Jones et al. 2002, Ann. Rheum. Dis. 61 (Suppl II): ii32-ii39) Osteopenic disorders such as adult and childhood leukaemia (Oliveri et al. 1999, Henry Ford Hosp. Med. 39: 45-48), chronic infections such as hepatitis C or HIV (Stellon et al. 1985, Gastroenterology 89: 1078-1083), autoimmune disorders such as diabetes mellitus (Piepkorn et al. 1997, Horm. Metab. Res. 29: 584-91), and lupus erythematosus (Seitz et al. 1985, Ann. Rheum Dis. 44: 438-445), allergic diseases such as asthma (Ebeling et al. 1998, J. Bone Min. Res. 13: 1283-1289), lytic bone metastases in multiple cancers such as breast cancer (Coleman 1998, Curr. Opin. Oncol. 10 (Suppl 1): 7-13); Prostate cancer; Myeloma bone disease (Anandarajah and Schwarz 2006, J. Cell Biochem. 97: 226-232); Periodontal infections (Anandarajah and Schwarz 2006, J. Cell Biochem. 97: 226-232); Expansile skeletal hyperphosphatasia (Anandarajah and Schwarz 2006, J. Cell Biochem. 97: 226-232); Bone metastases (Lewiecki 2006, Expert Opin. Biol. Ther. 6: 1041-1050; Anandarajah and Schwarz 2006, J. Cell Biochem. 97: 226-232).

[0027] Also encompassed within the scope of the present invention is the prevention and/or treatment with the amino acid sequences, the compounds and/or the polypeptides of the invention of other diseases and disorders associated with an imbalance in the RANK-L/RANK/OPG pathway. Such diseases and disorders include but are not limited to osteoporosis, inflammatory conditions, autoimmune conditions, asthma, rheumatoid arthritis, multiple sclerosis, Multiple myeloma (Sordillo and Pearse 2003, Cancer 97 (3 Suppl): 802-812; Vanderkerken et al. 2003, Cancer Res. 63: 287-289); Vascular diseases (Anandarajah and Schwarz 2006, J. Cell Biochem. 97: 226-232) and Cardiovascular disease (Lewiecki 2006, Expert Opin. Biol. Ther. 6: 1041-1050).

[0028] Also encompassed within the scope of the present invention is the prevention and/or treatment with the amino acid sequences, the compounds and/or the polypeptides of the invention of diseases and disorders associated with osteopetrosis such as osteopetrosis tarda, osteopetrosis congenita and marble bone disease.

[0029] In particular, the polypeptides and compositions of the present invention can be used for the prevention and treatment of bone diseases and disorders which are mediated by the pathway(s) in which RANK-L is involved. Examples of such bone diseases and disorders will again be clear to the skilled person based on the disclosure herein.

[0030] Thus, without being limited thereto, the amino acid sequences and polypeptides of the invention can for example be used to prevent and/or to treat all diseases and disorders that are currently being prevented or treated with active principles that can modulate RANK-L-mediated signalling, such as those mentioned in the prior art cited above. It is also envisaged that the polypeptides of the invention can be used to prevent and/or to treat all diseases and disorders for which treatment with such active principles is currently being developed, has been proposed, or will be proposed or developed in future. In addition, it is envisaged that, because of their favourable properties as further described herein, the polypeptides of the present invention may be used for the prevention and treatment of other diseases and disorders than those for which these known active principles are being used or will be proposed or developed; and/or that the polypeptides of the present invention may provide new methods and regimens for treating the diseases and disorders described herein.

[0031] Thus, without being limited thereto, the amino acid sequences and polypeptides of the invention can for example be used to prevent and/or to treat all diseases and disorders that are currently being prevented or treated with Denosumab.

[0032] Other applications and uses of the amino acid sequences and polypeptides of the invention will become clear to the skilled person from the further disclosure herein.

[0033] Generally, it is an object of the invention to provide pharmacologically active agents, as well as compositions comprising the same, that can be used in the diagnosis, prevention and/or treatment of bone diseases and disorders and of the further diseases and disorders mentioned herein; and to provide methods for the diagnosis, prevention and/or treatment of such diseases and disorders that involve the administration and/or use of such agents and compositions.

[0034] In particular, it is an object of the invention to provide such pharmacologically active agents, compositions and/or methods that have certain advantages compared to the agents, compositions and/or methods that are currently used and/or known in the art. These advantages will become clear from the further description below.

[0035] More in particular, it is an object of the invention to provide therapeutic proteins that can be used as pharmacologically active agents, as well as compositions comprising the same, for the diagnosis, prevention and/or treatment of bone diseases and disorders and of the further diseases and disorders mentioned herein; and to provide methods for the diagnosis, prevention and/or treatment of such diseases and disorders that involve the administration and/or the use of such therapeutic proteins and compositions.

[0036] Accordingly, it is a specific object of the present invention to provide amino acid sequences that are directed against (as defined herein) RANK-L, in particular against RANK-L from a warm-blooded animal, more in particular against RANK-L from a mammal, and especially against human RANK-L; and to provide proteins and polypeptides comprising or essentially consisting of at least one such amino acid sequence.

[0037] In particular, it is a specific object of the present invention to provide such amino acid sequences and such proteins and/or polypeptides that are suitable for prophylactic, therapeutic and/or diagnostic use in a warm-blooded animal, and in particular in a mammal, and more in particular in a human being.

[0038] More in particular, it is a specific object of the present invention to provide such amino acid sequences and such proteins and/or polypeptides that can be used for the prevention, treatment, alleviation and/or diagnosis of one or more diseases, disorders or conditions associated with RANK-L and/or mediated by RANK-L (such as the diseases, disorders and conditions mentioned herein) in a warm-blooded animal, in particular in a mammal, and more in particular in a human being.

[0039] It is also a specific object of the invention to provide such amino acid sequences and such proteins and/or polypeptides that can be used in the preparation of pharmaceutical or veterinary compositions for the prevention and/or treatment of one or more diseases, disorders or conditions associated with and/or mediated by RANK-L (such as the diseases, disorders and conditions mentioned herein) in a warm-blooded animal, in particular in a mammal, and more in particular in a human being.

[0040] In the invention, generally, these objects are achieved by the use of the amino acid sequences, proteins, polypeptides and compositions that are described herein.

[0041] In general, the invention provides amino acid sequences that are directed against (as defined herein) and/or can specifically bind (as defined herein) to RANK-L; as well as compounds and constructs, and in particular proteins and polypeptides, that comprise at least one such amino acid sequence.

[0042] More in particular, the invention provides amino acid sequences can bind to RANK-L with an affinity (suitably measured and/or expressed as a K_{D}-value (actual or apparent), a K_{A}-value (actual or apparent), a kₒₙ-rate and/or a k_{off}-rate, or alternatively as an IC₅₀ value, as further described herein) that is as defined herein; as well as compounds and constructs, and in particular proteins and polypeptides, that comprise at least one such amino acid sequence.

[0043] In particular, amino acid sequences and polypeptides of the invention are preferably such that they:
[0044] bind to RANK-L with a dissociation constant (K_{D}) of 10⁻⁵ to 10⁻¹² moles/liter or less, and preferably 10⁻⁷ to 10⁻¹² moles/liter or less and more preferably 10⁻⁸ to 10⁻¹² moles/liter (i.e. with an association constant (K_{A}) of 10⁵ to 10¹² liter/moles or more, and preferably 10⁷ to 10¹² liter/moles or more and more preferably 10⁸ to 10¹² liter/moles);
   and/or such that they:
[0045] bind to RANK-L with a kₒₙ-rate of between 10² M⁻¹s⁻¹ to about 10⁷ M⁻¹s⁻¹, preferably between 10³ M⁻¹s⁻¹ and 10⁷ M⁻¹s⁻¹, more preferably between 10⁴ M⁻¹s⁻¹ and 10⁷ M⁻¹s⁻¹, such as between 10⁵ M⁻¹s⁻¹ and 10⁷ M⁻¹s⁻¹;
   and/or such that they:
[0046] bind to RANK-L with a k_{off} rate between 1 s⁻¹ (t_{1/2}=0.69 s) and 10⁻⁶ s⁻¹ (providing a near irreversible complex with a t_{1/2} of multiple days), preferably between 10⁻² s⁻¹ and 10⁻⁶ s⁻¹, more preferably between 10⁻³ s⁻¹ and 10⁻⁶ s⁻¹, such as between 10⁻⁴ s⁻¹ and 10⁻⁶ s⁻¹.

[0047] Preferably, a monovalent amino acid sequence of the invention (or a polypeptide that contains only one amino acid sequence of the invention) is preferably such that it will bind to RANK-L with an affinity less than 500 nM, preferably less than 200 nM, more preferably less than 10 nM, such as less than 500 pM.

[0048] Some preferred EC50 and IC50 values for binding of the amino acid sequences or polypeptides of the invention to RANK-L will become clear from the further description and examples herein.

[0049] For binding to RANK-L, an amino acid sequence of the invention will usually contain within its amino acid sequence one or more amino acid residues or one or more stretches of amino acid residues (i.e. with each “stretch” comprising two or amino acid residues that are adjacent to each other or in close proximity to each other, i.e. in the primary or tertiary structure of the amino acid sequence) via which the amino acid sequence of the invention can bind to RANK-L, which amino acid residues or stretches of amino acid residues thus form the “site” for binding to RANK-L (also referred to herein as the “antigen binding site”).

[0050] The amino acid sequences provided by the invention are preferably in essentially isolated form (as defined herein), or form part of a protein or polypeptide of the invention (as defined herein), which may comprise or essentially consist of one or more amino acid sequences of the invention and which may optionally further comprise one or more further amino acid sequences (all optionally linked via one or more suitable linkers). For example, and without limitation, the one or more amino acid sequences of the invention may be used as a binding unit in such a protein or polypeptide, which may optionally contain one or more further amino acid sequences that can serve as a binding unit (i.e. against one or more other targets than RANK-L), so as to provide a monovalent, multivalent or multispecific polypeptide of the invention, respectively, all as described herein. Such a protein or polypeptide may also be in essentially isolated form (as defined herein).

[0051] The amino acid sequences and polypeptides of the invention as such preferably essentially consist of a single amino acid chain that is not linked via disulphide bridges to any other amino acid sequence or chain (but that may or may not contain one or more intramolecular disulphide bridges. For example, it is known that Nanobodies—as described herein—may sometimes contain a disulphide bridge between CDR3 and CDR1 or FR2). However, it should be noted that one or more amino acid sequences of the invention may be linked to each other and/or to other amino acid sequences (e.g. via disulphide bridges) to provide peptide constructs that may also be useful in the invention (for example Fab′ fragments, F(ab′)₂ fragments, ScFv constructs, “diabodies” and other multispecific constructs. Reference is for example made to the review by Holliger and Hudson, Nat Biotechnol. 2005 September; 23(9):1126-36).

[0052] Generally, when an amino acid sequence of the invention (or a compound, construct or polypeptide comprising the same) is intended for administration to a subject (for example for therapeutic and/or diagnostic purposes as described herein), it is preferably either an amino acid sequence that does not occur naturally in said subject; or, when it does occur naturally in said subject, in essentially isolated form (as defined herein).

[0053] It will also be clear to the skilled person that for pharmaceutical use, the amino acid sequences of the invention (as well as compounds, constructs and polypeptides comprising the same) are preferably directed against human RANK-L; whereas for veterinary purposes, the amino acid sequences and polypeptides of the invention are preferably directed against RANK-L from the species to be treated, or at least cross-reactive with RANK-L from the species to be treated.

[0054] Furthermore, an amino acid sequence of the invention may optionally, and in addition to the at least one binding site for binding against RANK-L, contain one or more further binding sites for binding against other antigens, proteins or targets.

[0055] The efficacy of the amino acid sequences and polypeptides of the invention, and of compositions comprising the same, can be tested using any suitable in vitro assay, cell-based assay, in vivo assay and/or animal model known per se, or any combination thereof, depending on the specific disease or disorder involved. Suitable in vitro assays will be clear to the skilled person, and for example include ELISA; FACS binding assay; Biacore; competition binding assay (AlphaScreen®, Perkin Elmer, Massachusetts, USA; FMAT); TRAP assay (osteoclast differentiation assay; Rissanen et al. 2005, J. Bone Miner. Res. 20, Suppl. 1: S256); NF-kappaB reporter gene assay (Mizukami et al. 2002, Mol. Cell. Biol. 22: 992-1000). EC50 values for binding of the Nanobodies of the invention (and of polypeptides comprising the same) to RANK-L in, for example ELISA or FACS are preferably 1 μM to 1 pM, more preferably 1 nM to 1 pM and more preferably 100 pM to 1 pM. IC50 values for binding of the Nanobodies of the invention (and of polypeptides comprising the same) to RANK-L in, for example, AlphaScreen®, NF-kappaB assay or TRAP assay are preferably 1 μM to 1 pM, more preferably 1 nM to 1 pM and more preferably 100 pM to 1 pM.

[0056] Suitable animal models will be clear to the skilled person, and for example include (SCID)/ARH-77 mouse model (Sordillo and Pearse 2003, Cancer 97 (3 Suppl): 802-812); SCID-hu mouse model of human MM (Sordillo and Pearse 2003, Cancer 97 (3 Suppl): 802-812; Tassone et al. 2005, Blood 106: 713-716); Transgenic mice that overexpress OPG under control of apoE gene promoter and associated enhancer (Simonet et al. 1997, Cell 89: 309-319); Mouse model of sarcoma-induced bone destruction (Honore et al. 2000, Nat. Med. 6: 521-528); Ovariectomized animal models such as, for example, ovariectomized monkeys (Jerome et al. 1995, Bone 17: 403S-408S), ovariectomized mice (Roggia et al. 2001, Proc. Natl. Acad. Sci. USA 20: 13960-13965) or ovariectomized rats and cynomolgus monkeys (Simonet et al. 1997, Cell 89: 309-319; Høegh-Andersen et al. 2004, Arthritis Res. Ther. 6: R169-R180); Rat (animal) models for arthritis (Bendele et al. 1999, Toxicologic Pathology 27: 134-142; Romas et al. 2002, Am. J. Pathol. 161: 1419-1427; Mori et al. 2002, Histochemistry and Cell Biology 117: 283-292) such as models for collagen-induced arthritis or models for adjuvant-induced arthritis; Animal models of tumor-derived PTHrP-induced hypercalcemia (Morony et al. 1999, J. Bone Miner. Res. 14: 1478-1485; Capparelli et al. 2000, Cancer Res. 60: 783-778); Murine model of multiple myeloma (Vanderkerken et al. 2003, Cancer Res. 63: 287-289); Inflammatory Bowel Disease model in mice (Byrne et al. 2005, Gut 54: 78-86); Transgenic mice overexpressing MIF (Onodera et al. 2006, J. Bone Miner. Res. 21: 876-885); Transgenic mice overexpressing soluble osteoclast differentiation factor (sODF) (Mizuno et al. 2002, 20: 337-44); Transgenic mice expressing CSF-1 under control of the CSF-1R promoter/first intron driver [transgene TgN(Csf1r-Csf1)Ers (TgRC) mice] (Wei et al. 2006, J. Leukoc. Biol. 80: 1445-1453); Transgenic mice overexpressing core-binding factor alpha1 (Cbfa1) (Geoffroy et al. Mol. Cell Biol. 22: 6222-6233); Transgenic mice overexpressing Decoy receptor 3 (DcR3) (Tang et al. 2007, J. Biol. Chem. 282: 2346-2354), as well as the assays and animal models used in the experimental part below and in the prior art cited herein.

[0057] Also, according to the invention, amino acid sequences and polypeptides that are directed against RANK-L from a first species of warm-blooded animal may or may not show cross-reactivity with RANK-L from one or more other species of warm-blooded animal. For example, amino acid sequences and polypeptides directed against human RANK-L may or may not show cross reactivity with RANK-L from one or more other species of primates (such as, without limitation, monkeys from the genus Macaca (such as, and in particular, cynomolgus monkeys (Macaca fascicularis) and/or rhesus monkeys (Macaca mulatta)) and baboon (Papio ursinus)) and/or with RANK-L from one or more species of animals that are often used in animal models for diseases (for example mouse, rat, rabbit, pig or dog), and in particular in animal models for diseases and disorders associated with RANK-L (such as the species and animal models mentioned herein). In this respect, it will be clear to the skilled person that such cross-reactivity, when present, may have advantages from a drug development point of view, since it allows the amino acid sequences and polypeptides against human RANK-L to be tested in such disease models.

[0058] More generally, amino acid sequences and polypeptides of the invention that are cross-reactive with RANK-L from multiple species of mammal will usually be advantageous for use in veterinary applications, since it will allow the same amino acid sequence or polypeptide to be used across multiple species. Thus, it is also encompassed within the scope of the invention that amino acid sequences and polypeptides directed against RANK-L from one species of animal (such as amino acid sequences and polypeptides against human RANK-L) can be used in the treatment of another species of animal, as long as the use of the amino acid sequences and/or polypeptides provide the desired effects in the species to be treated.

[0059] In one embodiment, the amino acid sequences and polypeptides of the invention directed against human RANK-L are cross-reactive with RANK-L from cynomolgus monkey.

[0060] In another embodiment, the amino acid sequences and polypeptides of the invention directed against human RANK-L are cross-reactive with RANK-L from mice or rats.

[0061] In another embodiment, the amino acid sequences and polypeptides of the invention directed against human RANK-L are cross-reactive with RANK-L from cynomolgus monkey and with RANK-L from mice or rats.

[0062] In another embodiment, the amino acid sequences and polypeptides of the invention directed against human RANK-L are not cross-reactive with RANK-L from mice or rats.

[0063] In another embodiment, the amino acid sequences and polypeptides of the invention directed against human RANK-L are cross-reactive with RANK-L from cynomolgus monkey while not being cross-reactive with RANK-L from mice or rats.

[0064] In another embodiment, the amino acid sequences and polypeptides of the invention directed against human RANK-L are not cross-reactive with RANK-L from cynomolgus monkey.

[0065] In another embodiment, the amino acid sequences and polypeptides of the invention directed against human RANK-L are not cross-reactive with RANK-L from cynomolgus monkey and not with RANK-L from mice or rats.

[0066] The present invention is in its broadest sense also not particularly limited to or defined by a specific antigenic determinant, epitope, part, domain, subunit or confirmation (where applicable) of RANK-L against which the amino acid sequences and polypeptides of the invention are directed. For example, the amino acid sequences and polypeptides may or may not be directed against an “interaction site” (as defined herein). However, it is generally assumed and preferred that the amino acid sequences and polypeptides of the invention are preferably directed against an interaction site (as defined herein), and in particular against the binding site on RANK-L for RANK or against the binding site on RANK-L for OPG.

[0067] Thus, in one preferred, but non-limiting aspect, the amino acid sequences and polypeptides of the invention are directed against the RANK receptor binding site on RANK-L, and are as further defined herein. Binding of the amino acid sequences and polypeptides of the invention to the RANK receptor binding site on RANK-L may inhibit and/or prevent binding of RANK-L to RANK, and thus inhibit or prevent the signalling that is mediated by this RANK-L/RANK binding. The amino acid sequences and polypeptides of the invention therefore can act as antagonists of the RANK-L/RANK mediated signalling.

[0068] In one, specific, but non-limiting aspect, the amino acid sequences and polypeptides of the invention are directed against the RANK receptor binding site on RANK-L while not interfering (reducing/inhibiting) with the RANK-L/OPG interaction. In this specific aspect, the amino acid sequences and polypeptides of the invention will act as antagonists of the RANK-L/RANK mediated signalling (and inhibit osteoclast maturation and activation) in addition to the OPG mediated inhibition of osteoclast maturation and activation.

[0069] In another preferred, but non-limiting aspect, the amino acid sequences and polypeptides of the invention are directed against the OPG binding site on RANK-L, and are as further defined herein. Binding of the amino acid sequences and polypeptides of the invention to the OPG binding site on RANK-L may inhibit and/or prevent binding of RANK-L to OPG. The amino acid sequences and polypeptides of the invention may therefore act as a competitive or as a non-competitive inhibitor of the binding of RANK-L to OPG (e.g. in ELISA, in AlphaScreen® assay, in TRAP assay and/or in NFkappaB assay). Binding of the amino acid sequences and polypeptides of the invention to the OPG binding site on RANK-L may, by its turn, inhibit and/or prevent binding of RANK-L to RANK, and thus inhibit and/or prevent the signalling that is mediated by this RANK-L/RANK binding. The amino acid sequences and polypeptides of the invention therefore can act as antagonists of the RANK-L and RANK-L/RANK mediated signalling (i.e. they inhibit RANK/RANK-L interaction).

[0070] In some cases, however, the amino acid sequences and polypeptides of the invention may be directed against an OPG binding site on RANK-L and interfere with the binding of RANK-L to OPG without essentially reducing the binding of RANK-L to RANK. In this case the amino acid sequences and polypeptides of the invention may boost the signalling that is mediated by this RANK-L/RANK interaction and act as agonists of the RANK-L and RANK-L/RANK mediated signalling (i.e. they act as antagonist of the action of OPG).

[0071] In another aspect of the present invention, the amino acid sequences and polypeptides of the invention are preferably directed against an epitope on RANK-L that overlaps with the epitope of Denosumab. Binding of the amino acid sequences and polypeptides of the invention to an epitope on RANK-L that overlaps with the epitope of Denosumab may inhibit and/or prevent binding of Denosumab to RANK-L. The amino acid sequences and polypeptides of the invention may therefore act as a competitive or as a non-competitive inhibitor of the binding of Denosumab to RANK-L (e.g. in ELISA, in AlphaScreen® assay, in TRAP assay and/or in NFkappaB assay).

[0072] As further described herein, a polypeptide of the invention may contain two or more amino acid sequences of the invention that are directed against RANK-L. Generally, such polypeptides will bind to RANK-L with increased avidity compared to a single amino acid sequence of the invention. Such a polypeptide may for example comprise two amino acid sequences of the invention that are directed against the same antigenic determinant, epitope, part, domain, subunit or confirmation (where applicable) of RANK-L (which may or may not be an interaction site); or comprise at least one “first” amino acid sequence of the invention that is directed against a first same antigenic determinant, epitope, part, domain, subunit or confirmation (where applicable) of RANK-L (which may or may not be an interaction site); and at least one “second” amino acid sequence of the invention that is directed against a second antigenic determinant, epitope, part, domain, subunit or confirmation (where applicable) different from the first (and which again may or may not be an interaction site). Preferably, in such “biparatopic” polypeptides of the invention, at least one amino acid sequence of the invention is directed against an interaction site (as defined herein), although the invention in its broadest sense is not limited thereto.

[0073] Thus, in one particular aspect, a polypeptide of the invention may comprise two or more amino acid sequences of the invention that are directed against the binding site for RANK on RANK-L; or comprise at least one “first” amino acid sequence of the invention that is directed against the binding site for RANK on RANK-L; and at least one “second” amino acid sequence of the invention that is directed against a second antigenic determinant, epitope, part, domain, subunit or confirmation different from the first and which is not a binding site for RANK on RANK-L.

[0074] Thus, in another particular aspect, a polypeptide of the invention may comprise two or more amino acid sequences of the invention that are directed against the binding site for OPG on RANK-L; or comprise at least one “first” amino acid sequence of the invention that is directed against the binding site for OPG on RANK-L; and at least one “second” amino acid sequence of the invention that is directed against a second antigenic determinant, epitope, part, domain, subunit or confirmation different from the first and which is not a binding site for OPG on RANK-L.

[0075] Also, when the target is part of a binding pair (for example, a receptor-ligand binding pair), the amino acid sequences and polypeptides may be such that they compete with the cognate binding partner (e.g. the ligand, receptor or other binding partner, as applicable) for binding to the target, and/or such that they (fully or partially) neutralize binding of the binding partner to the target.

[0076] It is also within the scope of the invention that, where applicable, an amino acid sequence of the invention can bind to two or more antigenic determinants, epitopes, parts, domains, subunits or confirmations of RANK-L. In such a case, the antigenic determinants, epitopes, parts, domains or subunits of RANK-L to which the amino acid sequences and/or polypeptides of the invention bind may be essentially the same (for example, if RANK-L contains repeated structural motifs or occurs in a multimeric form) or may be different (and in the latter case, the amino acid sequences and polypeptides of the invention may bind to such different antigenic determinants, epitopes, parts, domains, subunits of RANK-L with an affinity and/or specificity which may be the same or different). In a preferred, but non-limiting aspect, the amino acid sequences and polypeptides of the invention bind two or three subunits of the RANK-L trimer. Also, for example, the amino acid sequences and polypeptides of the invention may bind to a conformation of RANK-L in which it is bound to a pertinent ligand, may bind to a conformation of RANK-L in which it not bound to a pertinent ligand, or may bind to both such conformations (again with an affinity and/or specificity which may be the same or different). For example, the amino acid sequences and polypeptides of the invention may bind to a conformation of RANK-L in which it is bound to RANK, may bind to a conformation of RANK-L in which it not bound to RANK, or may bind to both such conformations (again with an affinity and/or specificity which may be the same or different). For example, the amino acid sequences and polypeptides of the invention may bind to a conformation of RANK-L in which it is bound to OPG, may bind to a conformation of RANK-L in which it not bound to OPG, or may bind to both such conformations (again with an affinity and/or specificity which may be the same or different).

[0077] RANK-L exists in a membrane bound and soluble form. The amino acid sequences and polypeptides of the invention may bind to either forms, or preferably the amino acid sequences and polypeptides of the invention may bind to both these forms. RANK-L exists in four different isoforms (see supra). The amino acid sequences and polypeptides of the invention may bind to either one of the four isoforms of RANK-L, or may bind to more than one such as two, three or all four isoforms of RANK-L.

[0078] It is also expected that the amino acid sequences and polypeptides of the invention will generally bind to all naturally occurring or synthetic analogs, variants, mutants, alleles, parts and fragments of RANK-L; or at least to those analogs, variants, mutants, alleles, parts and fragments of RANK-L that contain one or more antigenic determinants or epitopes that are essentially the same as the antigenic determinant(s) or epitope(s) to which the amino acid sequences and polypeptides of the invention bind in RANK-L (e.g. in wild-type RANK-L). Again, in such a case, the amino acid sequences and polypeptides of the invention may bind to such analogs, variants, mutants, alleles, parts and fragments with an affinity and/or specificity that are the same as, or that are different from (i.e. higher than or lower than), the affinity and specificity with which the amino acid sequences of the invention bind to (wild-type) RANK-L. It is also included within the scope of the invention that the amino acid sequences and polypeptides of the invention bind to some analogs, variants, mutants, alleles, parts and fragments of RANK-L, but not to others.

[0079] The amino acid sequences and polypeptides of the invention may bind to other, related TNF family members (e.g. TRAIL, TNF-alpha and/or CD40 ligand). In a preferred aspect, however, the amino acid sequences and polypeptides of the invention will have no detectable affinity for related TNF family members (i.e. an affinity which is more than 10 times, preferably more than 100 times, more preferably more than 1000 times lower than its affinity for RANK-L). In one aspect, the amino acid sequences and polypeptides of the invention will have no detectable affinity for TRAIL. In another aspect, the amino acid sequences and polypeptides of the invention will have no detectable affinity for TNF-alpha. In another aspect, the amino acid sequences and polypeptides of the invention will have no detectable affinity for CD40 ligand. In yet another aspect, the amino acid sequences and polypeptides of the invention will have no detectable affinity for TRAIL, TNF-alpha and/or CD40 ligand.

[0080] Similar to all known TNF cytokine family members, RANK-L self-assembles into noncovalently associated trimers. When RANK-L exists in a monomeric form and in one or more multimeric forms, it is within the scope of the invention that the amino acid sequences and polypeptides of the invention only bind to RANK-L in monomeric form, only bind to RANK-L in multimeric form, or bind to both the monomeric and the multimeric form. Again, in such a case, the amino acid sequences and polypeptides of the invention may bind to the monomeric form with an affinity and/or specificity that are the same as, or that are different from (i.e. higher than or lower than), the affinity and specificity with which the amino acid sequences of the invention bind to the multimeric form.

[0081] In one non-limiting aspect of the invention, the amino acid sequences and polypeptides of the invention bind to RANK-L such that the formation of the RANK-L trimer is prevented and/or inhibited.

[0082] It is accepted that RANK-L binds one receptor molecule (RANK) along each of the three clefts (or grooves) formed by neighboring monomers of the homotrimer. In this way, the RANK-L trimer exhibits three spatially distinct, but equivalent, intersubunit receptor-binding grooves into which three receptor molecules bind. Therefore, in order to inhibit the interaction between RANK-L and its receptors, therapeutic molecules should preferably target these intersubunit receptor binding grooves of RANK-L. Nanobodies (as further defined herein) can show so-called cavity-binding properties (inter alia due to their extended CDR3 loop, compared to conventional V_{H} domains) and are therefore ideally suited for inhibition of the interaction of RANK-L with its RANK receptor. Accordingly, in a preferred aspect, the amino acid sequences and polypeptides of the invention bind to the intersubunit receptor-binding grooves of RANK-L

[0083] Also, when RANK-L can associate with other proteins or polypeptides to form protein complexes (e.g. with multiple subunits), it is within the scope of the invention that the amino acid sequences and polypeptides of the invention bind to RANK-L in its non-associated state, bind to RANK-L in its associated state, or bind to both. In all these cases, the amino acid sequences and polypeptides of the invention may bind to such multimers or associated protein complexes with an affinity and/or specificity that may be the same as or different from (i.e. higher than or lower than) the affinity and/or specificity with which the amino acid sequences and polypeptides of the invention bind to RANK-L in its monomeric and non-associated state.

[0084] Generally, amino acid sequences and polypeptides of the invention will at least bind to those forms of RANK-L (including monomeric, multimeric and associated forms) that are the most relevant from a biological and/or therapeutic point of view, as will be clear to the skilled person.

[0085] Also, generally, polypeptides of the invention that contain two or more amino acid sequences and/or Nanobodies directed against RANK-L may bind with higher avidity than the corresponding monomeric amino acid sequences and/or Nanobodies.

[0086] For example, and without limitation, a multivalent (as defined herein) protein or polypeptide that contains two or more amino acid sequences and/or Nanobodies that are directed against different epitopes of RANK-L may bind to RANK-L with higher avidity than the corresponding monomers.

[0087] More importantly, a multivalent (as defined herein) protein or polypeptide that contains two or more amino acid sequences and/or Nanobodies that are directed against RANK-L may (and usually will) bind with higher avidity to a multimer of RANK-L than to a monomer of RANK-L, and will usually also bind with higher avidity than the corresponding monomeric amino acid sequences and/or Nanobodies. In such a multivalent protein or polypeptide, the two or more amino acid sequences and/or Nanobodies may for example be directed against the same epitopes, substantially equivalent epitopes, or different epitopes. In one embodiment of such a multivalent protein or polypeptide, the two or more amino acid sequences and/or Nanobodies may be the same (and therefore be directed against the same epitope).

[0088] The latter is of particular importance, as it is known that the primary mode of signal transduction by RANK-L involves binding of RANK receptors to a trimer of RANK-L molecules, which contains three receptor binding sites (see for example Lam et al. 2001, J. Clin. Invest. 108: 971-979).

[0089] In the present invention, it has been found that amino acid sequences and/or Nanobodies are capable of binding to RANK-L in such a way that the activity of RANK-L is reduced, both in in vitro models and in cellular models (see the Experimental Section below). Although the invention is not limited to any specific mechanism, explanation or hypothesis, it is assumed that because of their small size and high affinity for RANK-L, two or three monovalent amino acid sequences and/or Nanobodies of the invention are capable of simultaneously occupying two or three different receptor binding sites on the RANK-L trimer, thus preventing the trimer to initiate receptor binding and thereby to initiate signal transduction (however, other mechanisms of action are not excluded: for example, depending on the epitope against which it is directed, an amino acid sequence and/or Nanobody of the invention may also inhibit the association of RANK-L into the trimeric state).

[0090] It should also be noted that, in addition or as an alternative to binding to two or more receptor binding sites on a single RANK-L trimer, the proteins or polypeptides of the present invention that comprises or essentially consists of two or more amino acid sequences and/or Nanobodies that are directed against epitopes of RANK-L may bind (e.g. intermolecularly) epitopes on two separate RANK-L molecules (e.g. two separate trimers).

[0091] However, according to one particularly preferred embodiment, the invention relates to a protein or polypeptide that comprises or essentially consists of two or more amino acid sequences and/or Nanobodies that are each directed against epitopes on RANK-L (and in particular on the RANK-L trimer) that lie in and/or form part of the receptor binding site(s) of the RANK-L trimer, such that said polypeptide, upon binding to a RANK-L trimer, is capable of inhibiting or reducing the RANK receptor binding that is mediated by said RANK-L trimer and/or the signal transduction that is mediated by such receptor binding.

[0092] In particular, according to this preferred embodiment, the invention relates to a protein or polypeptide that comprises or essentially consist of two or more amino acid sequences and/or Nanobodies that are each directed against epitopes on RANK-L (and in particular on the RANK-L trimer) that lie in and/or form part of the receptor binding site(s) of the RANK-L trimer, wherein said amino acid sequences and/or Nanobodies are linked to each other in such a way that the protein or polypeptide is capable of simultaneously binding to two or more receptor binding sites on a single RANK-L trimer (in other words, is capable of intramolecular binding to at least two RANK-L receptor binding sites on a RANK-L trimer). In this embodiment, the two or more amino acid sequences and/or Nanobodies are preferably as defined above and are most preferably Nanobodies (so that the protein or polypeptide is a multivalent Nanobody construct, as further described herein). Also, in this embodiment, the two or more amino acid sequences and/or Nanobodies may be the same or different; and may directed against different epitopes within the RANK receptor binding site(s), but are preferably directed against the same epitope. Some preferred, but non-limiting constructs of this embodiment of the invention are SEQ ID NO's: 622 to 693, 761 to 762 and 766 to 773.

[0093] In this embodiment of the invention, the two or more amino acid sequences and/or Nanobodies will usually be linked via one or more suitable linkers, which linkers are such that each amino acid sequences and/or Nanobodies can bind to a different receptor binding site on the same RANK-L trimer. Suitable linkers will inter alia depend on (the distance between) the epitopes on the RANK-L trimer to which the amino acid sequences and/or Nanobodies bind, and will be clear to the skilled person based on the disclosure herein, optionally after some limited degree of routine experimentation. For example, when the two or more amino acid sequences are (single) domain antibodies or Nanobodies, suitable linkers may be chosen from the linkers described herein, but with a linker length that is such that the two or more (single) domain antibodies or Nanobodies can each bind to a different receptor binding site on the same RANK-L trimer.

[0094] Also, when the two or more amino acid sequences that bind to the receptor binding sites of RANK-L are (single) domain antibodies or Nanobodies, they may also be linked to each other via a third (single) domain antibody or Nanobody (in which the two or more (single) domain antibodies or Nanobodies may be linked directly to the third (single) domain antibody/Nanobody or via suitable linkers). Such a third (single) domain antibody or Nanobody may for example be a (single) domain antibody or Nanobody that provides for an increased half-life, as further described herein. For example, the latter (single) domain antibody or Nanobody may be a (single) domain antibody or Nanobody that is capable of binding to a (human) serum protein such as (human) serum albumin, as further described herein. Some non-limiting examples of such constructs are the constructs of SEQ ID NO's: 694-729 and 759-760. Such a third (single) domain antibody or Nanobody may for example be a (single) domain antibody or Nanobody that is directed against and/or can bind another epitope on RANK-L, providing a biparatopic (single) domain antibody or Nanobodies, as is further described herein.

[0095] Alternatively, the two or more amino acid sequences and/or Nanobodies that bind to the receptor binding site(s) of RANK-L may be linked in series (either directly or via a suitable linker) and the third (single) domain antibody or Nanobody (which may provide for increased half-life or which may bind another epitope on RANK-L, as described above) may be connected directly or via a linker to one of these two or more aforementioned amino acid sequences and/or Nanobodies.

[0096] More generally, the distance between the two or more amino acid sequences and/or Nanobodies should be such that it allows the protein or polypeptide to undergo intramolecular binding to the RANK-L trimer (i.e. instead of intermolecular binding). The distance between the N-terminus and the C-terminus of two anti-RANK-L amino acid sequences and/or Nanobodies can be determined by any suitable means, such as by crystallography or molecular modelling (as described, for example, by Lam et al. 2001, J. Clin. Invest. 108: 971-979). These techniques generally also make it possible to determine whether a specific multivalent or multispecific protein or polypeptide is capable of providing intramolecular modelling. Alternatively, size-exclusion chromatography (as described by Santora et al., Anal. Biochem., 299: 119-129) could be used to determine whether a given protein or polypeptide of the invention will (predominantly) provide intramolecular binding to a RANK-L trimer or (predominantly) intermolecular binding between two or more RANK-L trimers. Thus, in one particular embodiment of the invention, a protein or polypeptide of the invention is preferably such that, in this experiment, it predominantly or essentially exclusively leads to intramolecular binding. However, as emphasized above, it should be noted that proteins or polypeptides of the invention that operate via intermolecular binding of separate RANK-L molecules (e.g. trimers) are also within the scope of the present invention.

[0097] Thus, in another preferred aspect, the invention provides for a multivalent or multispecific protein or polypeptide that comprises at least two amino acid sequences and/or Nanobodies against RANK-L (and in particular of the RANK-L trimer), in which said at least two amino acid sequences and/or Nanobodies are linked in such a way that the distance between the N-terminus and the C-terminus of the at least two anti-RANK-L amino acid sequences and/or Nanobodies is such that the protein or polypeptide is capable of undergoing intramolecular binding (as described herein) with a RANK-L trimer.

[0098] In such a preferred protein or polypeptide, the two or more amino acid sequences and/or Nanobodies may be linked in any suitable fashion, as long as the preferred distance between the N-terminus and the C-terminus of the at least two anti-RANK-L amino acid sequences and/or Nanobodies can be achieved, and/or as long as the protein or polypeptide is capable of undergoing intramolecular binding (as described herein) with a RANK-L trimer.

[0099] For example, in its simplest form, the at least two amino acid sequences and/or Nanobodies are directly linked via a suitable linker or spacer that provides for the preferred distance between the N-terminus and the C-terminus of the at least two anti-RANK-L amino acid sequences and/or Nanobodies and which may allow the protein or polypeptide to undergo intramolecular binding (as described herein) with a RANK-L trimer. Suitable linkers are described herein, and may—for example and without limitation—comprise an amino acid sequence, which amino acid sequence preferably has a length of from 1 up to 50 or more amino acids, more preferably from 5 to 30 amino acids, such as about 9 to 20 amino acids. Preferably, such an amino acid sequence should also be such that it allows the protein or polypeptide to undergo intramolecular binding (as described herein) with a RANK-L trimer.

[0100] Thus, in another preferred aspect, the invention provides for a multivalent or multispecific protein or polypeptide that comprises at least two amino acid sequences and/or Nanobodies against RANK-L (and in particular the RANK-L trimer), in which said amino acid sequences and/or Nanobodies are preferably directly linked to each other using a suitable linker or spacer such that the distance between the N-terminus and the C-terminus of the at least two anti-RANK-L amino acid sequences and/or Nanobodies is such that the protein or polypeptide is capable of undergoing intramolecular binding (as described herein) with a RANK-L trimer.

[0101] More preferably, in this preferred aspect, the linker or spacer is an amino acid sequence that preferably has a length of from 1 up to 50 or more amino acids, more preferably from 5 to 30 amino acids, such as about 9 to 20 amino acids. In one preferred, but non-limiting embodiment, the linker essentially consists of glycine and serine residues (as further described below). For example, one suitable linker is the GS9 linker described herein, which comprises 9 amino acid residues, the GS15 linker described herein, which comprises 15 amino acid residues, the GS20 linker described herein, which comprises 20 amino acid residues and the GS30 linker described herein, which comprises 30 amino acid residues.

[0102] In another embodiment, the at least two amino acid sequences and/or Nanobodies against RANK-L are linked to each other via another moiety (optionally via one or two linkers), such as another protein or polypeptide. In this embodiment, it may be desirable to have the preferred distance (i.e. as mentioned above) between the N-terminus and the C-terminus of the at least two anti-RANK-L amino acid sequences and/or Nanobodies, for example such that the protein or polypeptide can still undergo intramolecular binding (as described herein) with a RANK-L trimer. In this embodiment, the at least two amino acid sequences and/or Nanobodies may be linked directly to the other moiety, or using a suitable linker or spacer, again as long as the preferred distance and/or desired intramolecular binding can still be achieved. The moiety may be any suitable moiety which does not detract (too much) from the binding of the protein or polypeptide to RANK-L and/or from the further desired biological or pharmacological properties of the protein or polypeptide. As such, the moiety may be essentially inactive or may be biologically active, and as such may or may not improve the desired properties of the protein or polypeptide and/or may confer one or more additional desired properties to the protein or polypeptide. For example, and without limitation, the moiety may improve the half-life of the protein or polypeptide, and/or may reduce its immunogenicity or improve any other desired property. In one preferred embodiment, the moiety may be another amino acid sequences and/or Nanobody (including but not limited to a third amino acid sequences and/or Nanobody against RANK-L, although this is not necessary and usually less preferred), and in particular another amino acid sequences and/or Nanobody that improves the half-life of the protein or polypeptide, such as an amino acid sequences and/or Nanobody that is directed against a serum protein, for example against human serum albumin. Examples of such proteins and polypeptides are described herein.

[0103] Thus, in one embodiment, the invention relates to a multivalent multispecific construct comprising two or more amino acid sequences and/or Nanobodies that are each directed against epitopes on RANK-L (e.g. on the RANK-L trimer) that lie in and/or form part of the receptor binding site, and that are linked to each other via at least one amino acid sequences and/or Nanobody that provides for increased half-life (and optionally via one or more suitable linkers), such that said polypeptide, upon binding to a RANK-L trimer, is capable inhibiting or reducing the RANK receptor binding and/or the signal transduction that is mediated by said RANK-L trimer. Such a polypeptide may be such that said firstmentioned two or more amino acid sequences and/or Nanobodies can each bind to a different receptor binding site on a RANK-L trimer.

[0104] In particular, in this embodiment, the polypeptide may comprise a trivalent bispecific Nanobody, that comprises two Nanobodies that are each directed against epitopes on RANK-L (and in particular of the RANK-L trimer) that lie in and/or form part of the receptor binding site, in which said Nanobodies are linked to each other via a third Nanobody that provides for an increased half-life (e.g. a Nanobody that is directed to a serum protein such as human serum albumin), in which each of the firstmentioned two Nanobodies may be directly linked to said third Nanobody or via one or more suitable linkers, such that said polypeptide, upon binding to a RANK-L trimer, is capable of inhibiting or reducing the RANK receptor binding and/or the signal transduction that is mediated by said RANK-L trimer. Such a polypeptide may be such that said firstmentioned two Nanobodies can each bind to a different receptor binding site on a RANK-L trimer. Again, some particularly preferred Nanobodies for use in this embodiment of the invention are presented in SEQ ID NO's: 560 to 621, as well as humanized and other variants thereof (such as e.g. SEQ ID NO's: 730 to 757 and 765); and the Nanobodies directed against human serum albumin described herein. Some preferred, but non-limiting constructs of this embodiment of the invention are SEQ ID NO's: 694 to 729 and 759 to 760.

[0105] It is also within the scope of the invention to use parts, fragments, analogs, mutants, variants, alleles and/or derivatives of the amino acid sequences and polypeptides of the invention, and/or to use proteins or polypeptides comprising or essentially consisting of one or more of such parts, fragments, analogs, mutants, variants, alleles and/or derivatives, as long as these are suitable for the uses envisaged herein. Such parts, fragments, analogs, mutants, variants, alleles and/or derivatives will usually contain (at least part of) a functional antigen-binding site for binding against RANK-L; and more preferably will be capable of specific binding to RANK-L, and even more preferably capable of binding to RANK-L with an affinity (suitably measured and/or expressed as a K_{D}-value (actual or apparent), a K_{A}-value (actual or apparent), a kₒₙ-rate and/or a k_{off}-rate, or alternatively as an IC₅₀ value, as further described herein) that is as defined herein. Some non-limiting examples of such parts, fragments, analogs, mutants, variants, alleles, derivatives, proteins and/or polypeptides will become clear from the further description herein. Additional fragments or polypeptides of the invention may also be provided by suitably combining (i.e. by linking or genetic fusion) one or more (smaller) parts or fragments as described herein.

[0106] In one specific, but non-limiting aspect of the invention, which will be further described herein, such analogs, mutants, variants, alleles, derivatives have an increased half-life in serum (as further described herein) compared to the amino acid sequence from which they have been derived. For example, an amino acid sequence of the invention may be linked (chemically or otherwise) to one or more groups or moieties that extend the half-life (such as PEG), so as to provide a derivative of an amino acid sequence of the invention with increased half-life.

[0107] In one specific, but non-limiting aspect, the amino acid sequence of the invention may be an amino acid sequence that comprises an immunoglobulin fold or may be an amino acid sequence that, under suitable conditions (such as physiological conditions) is capable of forming an immunoglobulin fold (i.e. by folding). Reference is inter alia made to the review by Halaby et al., J. (1999) Protein Eng. 12, 563-71. Preferably, when properly folded so as to form an immunoglobulin fold, such an amino acid sequence is capable of specific binding (as defined herein) to RANK-L; and more preferably capable of binding to RANK-L with an affinity (suitably measured and/or expressed as a K_{D}-value (actual or apparent), a K_{A}-value (actual or apparent), a kₒₙ-rate and/or a k_{off}-rate, or alternatively as an IC₅₀ value, as further described herein) that is as defined herein. Also, parts, fragments, analogs, mutants, variants, alleles and/or derivatives of such amino acid sequences are preferably such that they comprise an immunoglobulin fold or are capable for forming, under suitable conditions, an immunoglobulin fold.

[0108] In particular, but without limitation, the amino acid sequences of the invention may be amino acid sequences that essentially consist of 4 framework regions (FR1 to FR4 respectively) and 3 complementarity determining regions (CDR1 to CDR3 respectively); or any suitable fragment of such an amino acid sequence (which will then usually contain at least some of the amino acid residues that form at least one of the CDR's, as further described herein).

[0109] The amino acid sequences of the invention may in particular be an immunoglobulin sequence or a suitable fragment thereof, and more in particular be an immunoglobulin variable domain sequence or a suitable fragment thereof, such as light chain variable domain sequence (e.g. a V_{L}-sequence) or a suitable fragment thereof; or a heavy chain variable domain sequence (e.g. a V_{H}-sequence) or a suitable fragment thereof. When the amino acid sequence of the invention is a heavy chain variable domain sequence, it may be a heavy chain variable domain sequence that is derived from a conventional four-chain antibody (such as, without limitation, a V_{H} sequence that is derived from a human antibody) or be a so-called V_{HH}-sequence (as defined herein) that is derived from a so-called “heavy chain antibody” (as defined herein).

[0110] However, it should be noted that the invention is not limited as to the origin of the amino acid sequence of the invention (or of the nucleotide sequence of the invention used to express it), nor as to the way that the amino acid sequence or nucleotide sequence of the invention is (or has been) generated or obtained. Thus, the amino acid sequences of the invention may be naturally occurring amino acid sequences (from any suitable species) or synthetic or semi-synthetic amino acid sequences. In a specific but non-limiting aspect of the invention, the amino acid sequence is a naturally occurring immunoglobulin sequence (from any suitable species) or a synthetic or semi-synthetic immunoglobulin sequence, including but not limited to “humanized” (as defined herein) immunoglobulin sequences (such as partially or fully humanized mouse or rabbit immunoglobulin sequences, and in particular partially or fully humanized V_{HH} sequences or Nanobodies), “camelized” (as defined herein) immunoglobulin sequences, as well as immunoglobulin sequences that have been obtained by techniques such as affinity maturation (for example, starting from synthetic, random or naturally occurring immunoglobulin sequences), CDR grafting, veneering, combining fragments derived from different immunoglobulin sequences, PCR assembly using overlapping primers, and similar techniques for engineering immunoglobulin sequences well known to the skilled person; or any suitable combination of any of the foregoing. Reference is for example made to the standard handbooks, as well as to the further description and prior art mentioned herein.

[0111] Similarly, the nucleotide sequences of the invention may be naturally occurring nucleotide sequences or synthetic or semi-synthetic sequences, and may for example be sequences that are isolated by PCR from a suitable naturally occurring template (e.g. DNA or RNA isolated from a cell), nucleotide sequences that have been isolated from a library (and in particular, an expression library), nucleotide sequences that have been prepared by introducing mutations into a naturally occurring nucleotide sequence (using any suitable technique known per se, such as mismatch PCR), nucleotide sequence that have been prepared by PCR using overlapping primers, or nucleotide sequences that have been prepared using techniques for DNA synthesis known per se.

[0112] The amino acid sequence of the invention may in particular be a domain antibody (or an amino acid sequence that is suitable for use as a domain antibody), a single domain antibody (or an amino acid sequence that is suitable for use as a single domain antibody), a “dAb” (or an amino acid sequence that is suitable for use as a dAb) or a Nanobody (as defined herein, and including but not limited to a V_{HH} sequence); other single variable domains, or any suitable fragment of any one thereof. For a general description of (single) domain antibodies, reference is also made to the prior art cited above, as well as to EP 0 368 684. For the term “dAb's”, reference is for example made to Ward et al. (Nature 1989 Oct. 12; 341 (6242): 544-6), to Holt et al., Trends Biotechnol., 2003, 21(11):484-490; as well as to for example WO 06/030220, WO 06/003388 and other published patent applications of Domantis Ltd. It should also be noted that, although less preferred in the context of the present invention because they are not of mammalian origin, single domain antibodies or single variable domains can be derived from certain species of shark (for example, the so-called “IgNAR domains”, see for example WO 05/18629).

[0113] In particular, the amino acid sequence of the invention may be a Nanobody® (as defined herein) or a suitable fragment thereof. [Note: Nanobody®, Nanobodies® and Nanoclone® are registered trademarks of Ablynx N.V.] Such Nanobodies directed against RANK-L will also be referred to herein as “Nanobodies of the invention”.

[0114] For a general description of Nanobodies, reference is made to the further description below, as well as to the prior art cited herein. In this respect, it should however be noted that this description and the prior art mainly described Nanobodies of the so-called “V_{H}3 class” (i.e. Nanobodies with a high degree of sequence homology to human germline sequences of the V_{H}3 class such as DP-47, DP-51 or DP-29), which Nanobodies form a preferred aspect of this invention. It should however be noted that the invention in its broadest sense generally covers any type of Nanobody directed against RANK-L, and for example also covers the Nanobodies belonging to the so-called “V_{H}4 class” (i.e. Nanobodies with a high degree of sequence homology to human germline sequences of the V_{H}4 class such as DP-78), as for example described in WO 07/118,670.

[0115] Generally, Nanobodies (in particular V_{HH} sequences and partially humanized Nanobodies) can in particular be characterized by the presence of one or more “Hallmark residues” (as described herein) in one or more of the framework sequences (again as further described herein).

[0116] Thus, generally, a Nanobody can be defined as an amino acid sequence with the (general) structure

FR1-CDR1-FR2-CDR2-FR3-CDR3-FR4

in which FR1 to FR4 refer to framework regions 1 to 4, respectively, and in which CDR1 to CDR3 refer to the complementarity determining regions 1 to 3, respectively, and in which one or more of the Hallmark residues are as further defined herein.

[0117] In particular, a Nanobody can be an amino acid sequence with the (general) structure

FR1-CDR1-FR2-CDR2-FR3-CDR3-FR4

in which FR1 to FR4 refer to framework regions 1 to 4, respectively, and in which CDR1 to CDR3 refer to the complementarity determining regions 1 to 3, respectively, and in which the framework sequences are as further defined herein.

[0118] More in particular, a Nanobody can be an amino acid sequence with the (general) structure

FR1-CDR1-FR2-CDR2-FR3-CDR3-FR4

in which FR1 to FR4 refer to framework regions 1 to 4, respectively, and in which CDR1 to CDR3 refer to the complementarity determining regions 1 to 3, respectively, and in which:
[0119] i) preferably one or more of the amino acid residues at positions 11, 37, 44, 45, 47, 83, 84, 103, 104 and 108 according to the Kabat numbering are chosen from the Hallmark residues mentioned in Table A-3 below;
   and in which:
[0120] ii) said amino acid sequence has at least 80% amino acid identity with at least one of the amino acid sequences of SEQ ID NO's: 1 to 22, in which for the purposes of determining the degree of amino acid identity, the amino acid residues that form the CDR sequences (indicated with X in the sequences of SEQ ID NO's: 1 to 22) are disregarded.

[0121] In these Nanobodies, the CDR sequences are generally as further defined herein.

[0122] Thus, the invention also relates to such Nanobodies that can bind to (as defined herein) and/or are directed against RANK-L, to suitable fragments thereof, as well as to polypeptides that comprise or essentially consist of one or more of such Nanobodies and/or suitable fragments.

[0123] SEQ ID NO's: 560-621 give the amino acid sequences of a number of V_{HH} sequences that have been raised against RANK-L.

[0124] In particular, the invention in some specific aspects provides:
[0125] amino acid sequences that are directed against (as defined herein) RANK-L and that have at least 80%, preferably at least 85%, such as 90% or 95% or more sequence identity with at least one of the amino acid sequences of SEQ ID NO's: 560-621. These amino acid sequences may further be such that they neutralize binding of RANK or OPG to RANK-L; and/or compete with RANK or OPG for binding to RANK-L; and/or are directed against an interaction site (as defined herein) on RANK-L (such as the RANK or OPG binding site);
[0126] amino acid sequences that cross-block (as defined herein) the binding of at least one of the amino acid sequences of SEQ ID NO's: 560-621 to RANK-L and/or that compete with at least one of the amino acid sequences of SEQ ID NO's: 560-621 for binding to RANK-L. Again, these amino acid sequences may further be such that they neutralize binding of the cognate ligand to RANK-L; and/or compete with the cognate ligand for binding to RANK-L; and/or are directed against an interaction site (as defined herein) on RANK-L (such as the RANK or OPG binding site);
   which amino acid sequences may be as further described herein (and may for example be Nanobodies); as well as polypeptides of the invention that comprise one or more of such amino acid sequences (which may be as further described herein, and may for example be bispecific and/or biparatopic polypeptides as described herein), and nucleic acid sequences that encode such amino acid sequences and polypeptides. Such amino acid sequences and polypeptides do not include any naturally occurring ligands.

[0127] Accordingly, some particularly preferred Nanobodies of the invention are Nanobodies which can bind (as further defined herein) to and/or are directed against to RANK-L and which:
[0128] i) have at least 80% amino acid identity with at least one of the amino acid sequences of SEQ ID NO's: 560-621, in which for the purposes of determining the degree of amino acid identity, the amino acid residues that form the CDR sequences are disregarded. In this respect, reference is also made to Table A-1, which lists the framework 1 sequences (SEQ ID NO's: 126-187), framework 2 sequences (SEQ ID NO's: 250-311), framework 3 sequences (SEQ ID NO's: 374-435) and framework 4 sequences (SEQ ID NO's: 498-559) of the Nanobodies of SEQ ID NO's: 560-621 (with respect to the amino acid residues at positions 1 to 4 and 27 to 30 of the framework 1 sequences, reference is also made to the comments made below. Thus, for determining the degree of amino acid identity, these residues are preferably disregarded);
   and in which:
[0129] ii) preferably one or more of the amino acid residues at positions 11, 37, 44, 45, 47, 83, 84, 103, 104 and 108 according to the Kabat numbering are chosen from the Hallmark residues mentioned in Table A-3 below.

[0130] In these Nanobodies, the CDR sequences are generally as further defined herein.

[0131] Again, such Nanobodies may be derived in any suitable manner and from any suitable source, and may for example be naturally occurring V_{HH} sequences (i.e. from a suitable species of Camelid) or synthetic or semi-synthetic amino acid sequences, including but not limited to “humanized” (as defined herein) Nanobodies, “camelized” (as defined herein) immunoglobulin sequences (and in particular camelized heavy chain variable domain sequences), as well as Nanobodies that have been obtained by techniques such as affinity maturation (for example, starting from synthetic, random or naturally occurring immunoglobulin sequences), CDR grafting, veneering, combining fragments derived from different immunoglobulin sequences, PCR assembly using overlapping primers, and similar techniques for engineering immunoglobulin sequences well known to the skilled person; or any suitable combination of any of the foregoing as further described herein. Also, when a Nanobody comprises a V_{HH} sequence, said Nanobody may be suitably humanized, as further described herein, so as to provide one or more further (partially or fully) humanized Nanobodies of the invention. Similarly, when a Nanobody comprises a synthetic or semi-synthetic sequence (such as a partially humanized sequence), said Nanobody may optionally be further suitably humanized, again as described herein, again so as to provide one or more further (partially or fully) humanized Nanobodies of the invention.

[0132] In particular, humanized Nanobodies may be amino acid sequences that are as generally defined for Nanobodies in the previous paragraphs, but in which at least one amino acid residue is present (and in particular, in at least one of the framework residues) that is and/or that corresponds to a humanizing substitution (as defined herein). Some preferred, but non-limiting humanizing substitutions (and suitable combinations thereof) will become clear to the skilled person based on the disclosure herein. In addition, or alternatively, other potentially useful humanizing substitutions can be ascertained by comparing the sequence of the framework regions of a naturally occurring V_{HH} sequence with the corresponding framework sequence of one or more closely related human V_{H} sequences, after which one or more of the potentially useful humanizing substitutions (or combinations thereof) thus determined can be introduced into said V_{HH} sequence (in any manner known per se, as further described herein) and the resulting humanized V_{HH} sequences can be tested for affinity for the target, for stability, for ease and level of expression, and/or for other desired properties. In this way, by means of a limited degree of trial and error, other suitable humanizing substitutions (or suitable combinations thereof) can be determined by the skilled person based on the disclosure herein. Also, based on the foregoing, (the framework regions of) a Nanobody may be partially humanized or fully humanized.

[0133] Some particularly preferred humanized Nanobodies of the invention are humanized variants of the Nanobodies of SEQ ID NO's: 560-621, of which the amino acid sequences of SEQ ID NO's: 730-757 and 765 are some especially preferred examples.

[0134] Thus, some other preferred Nanobodies of the invention are Nanobodies which can bind (as further defined herein) to RANK-L and which:
[0135] i) are a humanized variant of one of the amino acid sequences of SEQ ID NO's: 560-621; and/or
[0136] ii) have at least 80% amino acid identity with at least one of the amino acid sequences of SEQ ID NO's: 560-621 and/or at least one of the amino acid sequences of SEQ ID NO's: 730-757 and 765, in which for the purposes of determining the degree of amino acid identity, the amino acid residues that form the CDR sequences are disregarded;
   and in which:
[0137] i) preferably one or more of the amino acid residues at positions 11, 37, 44, 45, 47, 83, 84, 103, 104 and 108 according to the Kabat numbering are chosen from the Hallmark residues mentioned in Table A-3 below.

[0138] According to another specific aspect of the invention, the invention provides a number of stretches of amino acid residues (i.e. small peptides) that are particularly suited for binding to RANK-L. These stretches of amino acid residues may be present in, and/or may be incorporated into, an amino acid sequence of the invention, in particular in such a way that they form (part of) the antigen binding site of an amino acid sequence of the invention. As these stretches of amino acid residues were first generated as CDR sequences of heavy chain antibodies or V_{HH} sequences that were raised against RANK-L (or may be based on and/or derived from such CDR sequences, as further described herein), they will also generally be referred to herein as “CDR sequences” (i.e. as CDR1 sequences, CDR2 sequences and CDR3 sequences, respectively). It should however be noted that the invention in its broadest sense is not limited to a specific structural role or function that these stretches of amino acid residues may have in an amino acid sequence of the invention, as long as these stretches of amino acid residues allow the amino acid sequence of the invention to bind to RANK-L. Thus, generally, the invention in its broadest sense comprises any amino acid sequence that is capable of binding to RANK-L and that comprises one or more CDR sequences as described herein, and in particular a suitable combination of two or more such CDR sequences, that are suitably linked to each other via one or more further amino acid sequences, such that the entire amino acid sequence forms a binding domain and/or binding unit that is capable of binding to RANK-L. It should however also be noted that the presence of only one such CDR sequence in an amino acid sequence of the invention may by itself already be sufficient to provide an amino acid sequence of the invention that is capable of binding to RANK-L; reference is for example again made to the so-called “Expedite fragments” described in WO 03/050531.

[0139] Thus, in another specific, but non-limiting aspect, the amino acid sequence of the invention may be an amino acid sequence that comprises at least one amino acid sequence that is chosen from the group consisting of the CDR1 sequences, CDR2 sequences and CDR3 sequences that are described herein (or any suitable combination thereof). In particular, an amino acid sequence of the invention may be an amino acid sequence that comprises at least one antigen binding site, wherein said antigen binding site comprises at least one amino acid sequence that is chosen from the group consisting of the CDR1 sequences, CDR2 sequences and CDR3 sequences that are described herein (or any suitable combination thereof).

[0140] Generally, in this aspect of the invention, the amino acid sequence of the invention may be any amino acid sequence that comprises at least one stretch of amino acid residues, in which said stretch of amino acid residues has an amino acid sequence that corresponds to the sequence of at least one of the CDR sequences described herein. Such an amino acid sequence may or may not comprise an immunoglobulin fold. For example, and without limitation, such an amino acid sequence may be a suitable fragment of an immunoglobulin sequence that comprises at least one such CDR sequence, but that is not large enough to form a (complete) immunoglobulin fold (reference is for example again made to the “Expedite fragments” described in WO 03/050531). Alternatively, such an amino acid sequence may be a suitable “protein scaffold” that comprises least one stretch of amino acid residues that corresponds to such a CDR sequence (i.e. as part of its antigen binding site). Suitable scaffolds for presenting amino acid sequences will be clear to the skilled person, and for example comprise, without limitation, to binding scaffolds based on or derived from immunoglobulins (i.e. other than the immunoglobulin sequences already described herein), protein scaffolds derived from protein A domains (such as Affibodies™), tendamistat, fibronectin, lipocalin, CTLA-4, T-cell receptors, designed ankyrin repeats, avimers and PDZ domains (Binz et al., Nat. Biotech 2005, Vol 23:1257), and binding moieties based on DNA or RNA including but not limited to DNA or RNA aptamers (Ulrich et al., Comb Chem High Throughput Screen 2006 9(8):619-32).

[0141] Again, any amino acid sequence of the invention that comprises one or more of these CDR sequences is preferably such that it can specifically bind (as defined herein) to RANK-L, and more in particular such that it can bind to RANK-L with an affinity (suitably measured and/or expressed as a K_{D}-value (actual or apparent), a K_{A}-value (actual or apparent), a kₒₙ-rate and/or a k_{off}-rate, or alternatively as an IC₅₀ value, as further described herein), that is as defined herein.

[0142] More in particular, the amino acid sequences according to this aspect of the invention may be any amino acid sequence that comprises at least one antigen binding site, wherein said antigen binding site comprises at least two amino acid sequences that are chosen from the group consisting of the CDR1 sequences described herein, the CDR2 sequences described herein and the CDR3 sequences described herein, such that (i) when the first amino acid sequence is chosen from the CDR1 sequences described herein, the second amino acid sequence is chosen from the CDR2 sequences described herein or the CDR3 sequences described herein; (ii) when the first amino acid sequence is chosen from the CDR2 sequences described herein, the second amino acid sequence is chosen from the CDR1 sequences described herein or the CDR3 sequences described herein; or (iii) when the first amino acid sequence is chosen from the CDR3 sequences described herein, the second amino acid sequence is chosen from the CDR1 sequences described herein or the CDR3 sequences described herein.

[0143] Even more in particular, the amino acid sequences of the invention may be amino acid sequences that comprise at least one antigen binding site, wherein said antigen binding site comprises at least three amino acid sequences that are chosen from the group consisting of the CDR1 sequences described herein, the CDR2 sequences described herein and the CDR3 sequences described herein, such that the first amino acid sequence is chosen from the CDR1 sequences described herein, the second amino acid sequence is chosen from the CDR2 sequences described herein, and the third amino acid sequence is chosen from the CDR3 sequences described herein. Preferred combinations of CDR1, CDR2 and CDR3 sequences will become clear from the further description herein. As will be clear to the skilled person, such an amino acid sequence is preferably an immunoglobulin sequence (as further described herein), but it may for example also be any other amino acid sequence that comprises a suitable scaffold for presenting said CDR sequences.

[0144] Thus, in one specific, but non-limiting aspect, the invention relates to an amino acid sequence directed against RANK-L, that comprises one or more stretches of amino acid residues chosen from the group consisting of:
[0145] a) the amino acid sequences of SEQ ID NO's: 188-249;
[0146] b) amino acid sequences that have at least 80% amino acid identity with at least one of the amino acid sequences of SEQ ID NO's: 188-249;
[0147] c) amino acid sequences that have 3, 2, or 1 amino acid difference with at least one of the amino acid sequences of SEQ ID NO's: 188-249;
[0148] d) the amino acid sequences of SEQ ID NO's: 312-373 and 758;
[0149] e) amino acid sequences that have at least 80% amino acid identity with at least one of the amino acid sequences of SEQ ID NO's: 312-373 and 758;
[0150] f) amino acid sequences that have 3, 2, or 1 amino acid difference with at least one of the amino acid sequences of SEQ ID NO's: 312-373 and 758;
[0151] g) the amino acid sequences of SEQ ID NO's: 436-497;
[0152] h) amino acid sequences that have at least 80% amino acid identity with at least one of the amino acid sequences of SEQ ID NO's: 436-497;
[0153] i) amino acid sequences that have 3, 2, or 1 amino acid difference with at least one of the amino acid sequences of SEQ ID NO's: 436-497;
   or any suitable combination thereof.

[0154] When an amino acid sequence of the invention contains one or more amino acid sequences according to b) and/or c):
[0155] i) any amino acid substitution in such an amino acid sequence according to b) and/or c) is preferably, and compared to the corresponding amino acid sequence according to a), a conservative amino acid substitution, (as defined herein);
   and/or
[0156] ii) the amino acid sequence according to b) and/or c) preferably only contains amino acid substitutions, and no amino acid deletions or insertions, compared to the corresponding amino acid sequence according to a);
   and/or
[0157] iii) the amino acid sequence according to b) and/or c) may be an amino acid sequence that is derived from an amino acid sequence according to a) by means of affinity maturation using one or more techniques of affinity maturation known per se.

[0158] Similarly, when an amino acid sequence of the invention contains one or more amino acid sequences according to e) and/or f):
[0159] i) any amino acid substitution in such an amino acid sequence according to e) and/or f) is preferably, and compared to the corresponding amino acid sequence according to d), a conservative amino acid substitution, (as defined herein);
   and/or
[0160] ii) the amino acid sequence according to e) and/or f) preferably only contains amino acid substitutions, and no amino acid deletions or insertions, compared to the corresponding amino acid sequence according to d);
   and/or
[0161] iii) the amino acid sequence according to e) and/or f) may be an amino acid sequence that is derived from an amino acid sequence according to d) by means of affinity maturation using one or more techniques of affinity maturation known per se.

[0162] Also, similarly, when an amino acid sequence of the invention contains one or more amino acid sequences according to h) and/or i):
[0163] i) any amino acid substitution in such an amino acid sequence according to h) and/or i) is preferably, and compared to the corresponding amino acid sequence according to g), a conservative amino acid substitution, (as defined herein);
   and/or
[0164] ii) the amino acid sequence according to h) and/or i) preferably only contains amino acid substitutions, and no amino acid deletions or insertions, compared to the corresponding amino acid sequence according to g);
   and/or
[0165] iii) the amino acid sequence according to h) and/or i) may be an amino acid sequence that is derived from an amino acid sequence according to g) by means of affinity maturation using one or more techniques of affinity maturation known per se.

[0166] It should be understood that the last preceding paragraphs also generally apply to any amino acid sequences of the invention that comprise one or more amino acid sequences according to b), c), e), f), h) or i), respectively.

[0167] In this specific aspect, the amino acid sequence preferably comprises one or more stretches of amino acid residues chosen from the group consisting of:
[0168] i) the amino acid sequences of SEQ ID NO's: 188-249;
[0169] ii) the amino acid sequences of SEQ ID NO's: 312-373 and 758; and
[0170] iii) the amino acid sequences of SEQ ID NO's: 436-497;
   or any suitable combination thereof.

[0171] Also, preferably, in such an amino acid sequence, at least one of said stretches of amino acid residues forms part of the antigen binding site for binding against RANK-L.

[0172] In a more specific, but again non-limiting aspect, the invention relates to an amino acid sequence directed against RANK-L, that comprises two or more stretches of amino acid residues chosen from the group consisting of:
[0173] a) the amino acid sequences of SEQ ID NO's: 188-249;
[0174] b) amino acid sequences that have at least 80% amino acid identity with at least one of the amino acid sequences of SEQ ID NO's: 188-249;
[0175] c) amino acid sequences that have 3, 2, or 1 amino acid difference with at least one of the amino acid sequences of SEQ ID NO's: 188-249;
[0176] d) the amino acid sequences of SEQ ID NO's: 312-373 and 758;
[0177] e) amino acid sequences that have at least 80% amino acid identity with at least one of the amino acid sequences of SEQ ID NO's: 312-373 and 758;
[0178] f) amino acid sequences that have 3, 2, or 1 amino acid difference with at least one of the amino acid sequences of SEQ ID NO's: 312-373 and 758;
[0179] g) the amino acid sequences of SEQ ID NO's: 436-497;
[0180] h) amino acid sequences that have at least 80% amino acid identity with at least one of the amino acid sequences of SEQ ID NO's: 436-497;
[0181] i) amino acid sequences that have 3, 2, or 1 amino acid difference with at least one of the amino acid sequences of SEQ ID NO's: 436-497;
   such that (i) when the first stretch of amino acid residues corresponds to one of the amino acid sequences according to a), b) or c), the second stretch of amino acid residues corresponds to one of the amino acid sequences according to d), e), f), g), h) or i); (ii) when the first stretch of amino acid residues corresponds to one of the amino acid sequences according to d), e) or f), the second stretch of amino acid residues corresponds to one of the amino acid sequences according to a), b), c), g), h) or i); or (iii) when the first stretch of amino acid residues corresponds to one of the amino acid sequences according to g), h) or i), the second stretch of amino acid residues corresponds to one of the amino acid sequences according to a), b), c), d), e) or f).

[0182] In this specific aspect, the amino acid sequence preferably comprises two or more stretches of amino acid residues chosen from the group consisting of:
[0183] i) the amino acid sequences of SEQ ID NO's: 188-249;
[0184] ii) the amino acid sequences of SEQ ID NO's: 312-373 and 758; and
[0185] iii) the amino acid sequences of SEQ ID NO's: 436-497;
   such that, (i) when the first stretch of amino acid residues corresponds to one of the amino acid sequences of SEQ ID NO's: 188-249, the second stretch of amino acid residues corresponds to one of the amino acid sequences of SEQ ID NO's: 312-373 and 758 or of SEQ ID NO's: 436-497; (ii) when the first stretch of amino acid residues corresponds to one of the amino acid sequences of SEQ ID NO's: 312-373 and 758, the second stretch of amino acid residues corresponds to one of the amino acid sequences of SEQ ID NO's: 188-249 or of SEQ ID NO's: 436-497; or (iii) when the first stretch of amino acid residues corresponds to one of the amino acid sequences of SEQ ID NO's: 436-497, the second stretch of amino acid residues corresponds to one of the amino acid sequences of SEQ ID NO's: 188-249 or of SEQ ID NO's: 312-373 and 758.

[0186] Also, in such an amino acid sequence, the at least two stretches of amino acid residues again preferably form part of the antigen binding site for binding against RANK-L.

[0187] In an even more specific, but non-limiting aspect, the invention relates to an amino acid sequence directed against RANK-L, that comprises three or more stretches of amino acid residues, in which the first stretch of amino acid residues is chosen from the group consisting of:
[0188] a) the amino acid sequences of SEQ ID NO's: 188-249;
[0189] b) amino acid sequences that have at least 80% amino acid identity with at least one of the amino acid sequences of SEQ ID NO's: 188-249;
[0190] c) amino acid sequences that have 3, 2, or 1 amino acid difference with at least one of the amino acid sequences of SEQ ID NO's: 188-249;
   the second stretch of amino acid residues is chosen from the group consisting of:
[0191] d) the amino acid sequences of SEQ ID NO's: 312-373 and 758;
[0192] e) amino acid sequences that have at least 80% amino acid identity with at least one of the amino acid sequences of SEQ ID NO's: 312-373 and 758;
[0193] f) amino acid sequences that have 3, 2, or 1 amino acid difference with at least one of the amino acid sequences of SEQ ID NO's: 312-373 and 758;
   and the third stretch of amino acid residues is chosen from the group consisting of:
[0194] g) the amino acid sequences of SEQ ID NO's: 436-497;
[0195] h) amino acid sequences that have at least 80% amino acid identity with at least one of the amino acid sequences of SEQ ID NO's: 436-497;
[0196] i) amino acid sequences that have 3, 2, or 1 amino acid difference with at least one of the amino acid sequences of SEQ ID NO's: 436-497.

[0197] Preferably, in this specific aspect, the first stretch of amino acid residues is chosen from the group consisting of the amino acid sequences of SEQ ID NO's: 188-249; the second stretch of amino acid residues is chosen from the group consisting of the amino acid sequences of SEQ ID NO's: 312-373 and 758; and the third stretch of amino acid residues is chosen from the group consisting of the amino acid sequences of SEQ ID NO's: 436-497.

[0198] Again, preferably, in such an amino acid sequence, the at least three stretches of amino acid residues forms part of the antigen binding site for binding against RANK-L.

[0199] Preferred combinations of such stretches of amino acid sequences will become clear from the further disclosure herein.

[0200] Preferably, in such amino acid sequences the CDR sequences have at least 70% amino acid identity, preferably at least 80% amino acid identity, more preferably at least 90% amino acid identity, such as 95% amino acid identity or more or even essentially 100% amino acid identity with the CDR sequences of at least one of the amino acid sequences of SEQ ID NO's: 560-621. This degree of amino acid identity can for example be determined by determining the degree of amino acid identity (in a manner described herein) between said amino acid sequence and one or more of the sequences of SEQ ID NO's: 560-621, in which the amino acid residues that form the framework regions are disregarded. Also, such amino acid sequences of the invention can be as further described herein.

[0201] Also, such amino acid sequences are preferably such that they can specifically bind (as defined herein) to RANK-L; and more in particular bind to RANK-L with an affinity (suitably measured and/or expressed as a K_{D}-value (actual or apparent), a K_{A}-value (actual or apparent), a kₒₙ-rate and/or a k_{off}-rate, or alternatively as an IC₅₀ value, as further described herein) that is as defined herein.

[0202] When the amino acid sequence of the invention essentially consists of 4 framework regions (FR1 to FR4, respectively) and 3 complementarity determining regions (CDR1 to CDR3, respectively), the amino acid sequence of the invention is preferably such that:

[0203] CDR1 is chosen from the group consisting of:
[0204] a) the amino acid sequences of SEQ ID NO's: 188-249;
[0205] b) amino acid sequences that have at least 80% amino acid identity with at least one of the amino acid sequences of SEQ ID NO's: 188-249;
[0206] c) amino acid sequences that have 3, 2, or 1 amino acid difference with at least one of the amino acid sequences of SEQ ID NO's: 188-249;
   and/or

[0207] CDR2 is chosen from the group consisting of:
[0208] d) the amino acid sequences of SEQ ID NO's: 312-373 and 758;
[0209] e) amino acid sequences that have at least 80% amino acid identity with at least one of the amino acid sequences of SEQ ID NO's: 312-373 and 758;
[0210] f) amino acid sequences that have 3, 2, or 1 amino acid difference with at least one of the amino acid sequences of SEQ ID NO's: 312-373 and 758;
   and/or

[0211] CDR3 is chosen from the group consisting of:
[0212] g) the amino acid sequences of SEQ ID NO's: 436-497;
[0213] h) amino acid sequences that have at least 80% amino acid identity with at least one of the amino acid sequences of SEQ ID NO's: 436-497;
[0214] i) amino acid sequences that have 3, 2, or 1 amino acid difference with at least one of the amino acid sequences of SEQ ID NO's: 436-497.

[0215] In particular, such an amino acid sequence of the invention may be such that CDR1 is chosen from the group consisting of the amino acid sequences of SEQ ID NO's: 188-249; and/or CDR2 is chosen from the group consisting of the amino acid sequences of SEQ ID NO's: 312-373 and 758; and/or CDR3 is chosen from the group consisting of the amino acid sequences of SEQ ID NO's: 436-497.

[0216] In particular, when the amino acid sequence of the invention essentially consists of 4 framework regions (FR1 to FR4, respectively) and 3 complementarity determining regions (CDR1 to CDR3, respectively), the amino acid sequence of the invention is preferably such that:

[0217] CDR1 is chosen from the group consisting of:
[0218] a) the amino acid sequences of SEQ ID NO's: 188-249;
[0219] b) amino acid sequences that have at least 80% amino acid identity with at least one of the amino acid sequences of SEQ ID NO's: 188-249;
[0220] c) amino acid sequences that have 3, 2, or 1 amino acid difference with at least one of the amino acid sequences of SEQ ID NO's: 188-249;
   and

[0221] CDR2 is chosen from the group consisting of:
[0222] d) the amino acid sequences of SEQ ID NO's: 312-373 and 758;
[0223] e) amino acid sequences that have at least 80% amino acid identity with at least one of the amino acid sequences of SEQ ID NO's: 312-373 and 758;
[0224] f) amino acid sequences that have 3, 2, or 1 amino acid difference with at least one of the amino acid sequences of SEQ ID NO's: 312-373 and 758;
   and

[0225] CDR3 is chosen from the group consisting of:
[0226] g) the amino acid sequences of SEQ ID NO's: 436-497;
[0227] h) amino acid sequences that have at least 80% amino acid identity with at least one of the amino acid sequences of SEQ ID NO's: 436-497;
[0228] i) amino acid sequences that have 3, 2, or 1 amino acid difference with at least one of the amino acid sequences of SEQ ID NO's: 436-497; or any suitable fragment of such an amino acid sequence.

[0229] In particular, such an amino acid sequence of the invention may be such that CDR1 is chosen from the group consisting of the amino acid sequences of SEQ ID NO's: 188-249; and CDR2 is chosen from the group consisting of the amino acid sequences of SEQ ID NO's: 312-373 and 758; and CDR3 is chosen from the group consisting of the amino acid sequences of SEQ ID NO's: 436-497.

[0230] Again, preferred combinations of CDR sequences will become clear from the further description herein.

[0231] Also, such amino acid sequences are preferably such that they can specifically bind (as defined herein) to RANK-L; and more in particular bind to RANK-L with an affinity (suitably measured and/or expressed as a K_{D}-value (actual or apparent), a K_{A}-value (actual or apparent), a kₒₙ-rate and/or a k_{off}-rate, or alternatively as an IC₅₀ value, as further described herein) that is as defined herein.

[0232] In one preferred, but non-limiting aspect, the invention relates to an amino acid sequence that essentially consists of 4 framework regions (FR1 to FR4, respectively) and 3 complementarity determining regions (CDR1 to CDR3, respectively), in which the CDR sequences of said amino acid sequence have at least 70% amino acid identity, preferably at least 80% amino acid identity, more preferably at least 90% amino acid identity, such as 95% amino acid identity or more or even essentially 100% amino acid identity with the CDR sequences of at least one of the amino acid sequences of SEQ ID NO's: 560-621. This degree of amino acid identity can for example be determined by determining the degree of amino acid identity (in a manner described herein) between said amino acid sequence and one or more of the sequences of SEQ ID NO's: 560-621, in which the amino acid residues that form the framework regions are disregarded. Such amino acid sequences of the invention can be as further described herein.

[0233] In such an amino acid sequence of the invention, the framework sequences may be any suitable framework sequences, and examples of suitable framework sequences will be clear to the skilled person, for example on the basis the standard handbooks and the further disclosure and prior art mentioned herein.

[0234] The framework sequences are preferably (a suitable combination of) immunoglobulin framework sequences or framework sequences that have been derived from immunoglobulin framework sequences (for example, by humanization or camelization). For example, the framework sequences may be framework sequences derived from a light chain variable domain (e.g. a V_{L}-sequence) and/or from a heavy chain variable domain (e.g. a V_{H}-sequence). In one particularly preferred aspect, the framework sequences are either framework sequences that have been derived from a V_{HH}-sequence (in which said framework sequences may optionally have been partially or fully humanized) or are conventional V_{H} sequences that have been camelized (as defined herein).

[0235] The framework sequences are preferably such that the amino acid sequence of the invention is a domain antibody (or an amino acid sequence that is suitable for use as a domain antibody); is a single domain antibody (or an amino acid sequence that is suitable for use as a single domain antibody); is a “dAb” (or an amino acid sequence that is suitable for use as a dAb); or is a Nanobody™ (including but not limited to V_{HH} sequence). Again, suitable framework sequences will be clear to the skilled person, for example on the basis the standard handbooks and the further disclosure and prior art mentioned herein.

[0236] In particular, the framework sequences present in the amino acid sequences of the invention may contain one or more of Hallmark residues (as defined herein), such that the amino acid sequence of the invention is a Nanobody. Some preferred, but non-limiting examples of (suitable combinations of) such framework sequences will become clear from the further disclosure herein.

[0237] Again, as generally described herein for the amino acid sequences of the invention, it is also possible to use suitable fragments (or combinations of fragments) of any of the foregoing, such as fragments that contain one or more CDR sequences, suitably flanked by and/or linked via one or more framework sequences (for example, in the same order as these CDR's and framework sequences may occur in the full-sized immunoglobulin sequence from which the fragment has been derived). Such fragments may also again be such that they comprise or can form an immunoglobulin fold, or alternatively be such that they do not comprise or cannot form an immunoglobulin fold.

[0238] In one specific aspect, such a fragment comprises a single CDR sequence as described herein (and in particular a CDR3 sequence), that is flanked on each side by (part of) a framework sequence (and in particular, part of the framework sequence(s) that, in the immunoglobulin sequence from which the fragment is derived, are adjacent to said CDR sequence. For example, a CDR3 sequence may be preceded by (part of) a FR3 sequence and followed by (part of) a FR4 sequence). Such a fragment may also contain a disulphide bridge, and in particular a disulphide bridge that links the two framework regions that precede and follow the CDR sequence, respectively (for the purpose of forming such a disulphide bridge, cysteine residues that naturally occur in said framework regions may be used, or alternatively cysteine residues may be synthetically added to or introduced into said framework regions). For a further description of these “Expedite fragments”, reference is again made to WO 03/050531, as well as to the US provisional application of Ablynx N.V. entitled “Peptides capable of binding to serum proteins” of Ablynx N.V. (inventors: Revets, Hilde Adi Pierrette; Kolkman, Joost Alexander; and Hoogenboom, Hendricus Renerus Jacobus Mattheus) filed on Dec. 5, 2006 (see also PCT/EP2007/063348).

[0239] In another aspect, the invention relates to a compound or construct, and in particular a protein or polypeptide (also referred to herein as a “compound of the invention” or “polypeptide of the invention”, respectively) that comprises or essentially consists of one or more amino acid sequences of the invention (or suitable fragments thereof), and optionally further comprises one or more other groups, residues, moieties or binding units. As will become clear to the skilled person from the further disclosure herein, such further groups, residues, moieties, binding units or amino acid sequences may or may not provide further functionality to the amino acid sequence of the invention (and/or to the compound or construct in which it is present) and may or may not modify the properties of the amino acid sequence of the invention.

[0240] For example, such further groups, residues, moieties or binding units may be one or more additional amino acid sequences, such that the compound or construct is a (fusion) protein or (fusion) polypeptide. In a preferred but non-limiting aspect, said one or more other groups, residues, moieties or binding units are immunoglobulin sequences. Even more preferably, said one or more other groups, residues, moieties or binding units are chosen from the group consisting of domain antibodies, amino acid sequences that are suitable for use as a domain antibody, single domain antibodies, amino acid sequences that are suitable for use as a single domain antibody, “dAb”'s, amino acid sequences that are suitable for use as a dAb, or Nanobodies.

[0241] Alternatively, such groups, residues, moieties or binding units may for example be chemical groups, residues, moieties, which may or may not by themselves be biologically and/or pharmacologically active. For example, and without limitation, such groups may be linked to the one or more amino acid sequences of the invention so as to provide a “derivative” of an amino acid sequence or polypeptide of the invention, as further described herein.

[0242] Also within the scope of the present invention are compounds or constructs, that comprises or essentially consists of one or more derivatives as described herein, and optionally further comprises one or more other groups, residues, moieties or binding units, optionally linked via one or more linkers. Preferably, said one or more other groups, residues, moieties or binding units are amino acid sequences.

[0243] In the compounds or constructs described above, the one or more amino acid sequences of the invention and the one or more groups, residues, moieties or binding units may be linked directly to each other and/or via one or more suitable linkers or spacers. For example, when the one or more groups, residues, moieties or binding units are amino acid sequences, the linkers may also be amino acid sequences, so that the resulting compound or construct is a fusion (protein) or fusion (polypeptide).

[0244] The compounds or polypeptides of the invention can generally be prepared by a method which comprises at least one step of suitably linking the one or more amino acid sequences of the invention to the one or more further groups, residues, moieties or binding units, optionally via the one or more suitable linkers, so as to provide the compound or polypeptide of the invention. Polypeptides of the invention can also be prepared by a method which generally comprises at least the steps of providing a nucleic acid that encodes a polypeptide of the invention, expressing said nucleic acid in a suitable manner, and recovering the expressed polypeptide of the invention. Such methods can be performed in a manner known per se, which will be clear to the skilled person, for example on the basis of the methods and techniques further described herein.

[0245] The process of designing/selecting and/or preparing a compound or polypeptide of the invention, starting from an amino acid sequence of the invention, is also referred to herein as “formatting” said amino acid sequence of the invention; and an amino acid of the invention that is made part of a compound or polypeptide of the invention is said to be “formatted” or to be “in the format of” said compound or polypeptide of the invention. Examples of ways in which an amino acid sequence of the invention can be formatted and examples of such formats will be clear to the skilled person based on the disclosure herein; and such formatted amino acid sequences form a further aspect of the invention.

[0246] In one specific aspect of the invention, a compound of the invention or a polypeptide of the invention may have an increased half-life, compared to the corresponding amino acid sequence of the invention. Some preferred, but non-limiting examples of such compounds and polypeptides will become clear to the skilled person based on the further disclosure herein, and for example comprise amino acid sequences or polypeptides of the invention that have been chemically modified to increase the half-life thereof (for example, by means of pegylation); amino acid sequences of the invention that comprise at least one additional binding site for binding to a serum protein (such as serum albumin); or polypeptides of the invention that comprise at least one amino acid sequence of the invention that is linked to at least one moiety (and in particular at least one amino acid sequence) that increases the half-life of the amino acid sequence of the invention. Examples of polypeptides of the invention that comprise such half-life extending moieties or amino acid sequences will become clear to the skilled person based on the further disclosure herein; and for example include, without limitation, polypeptides in which the one or more amino acid sequences of the invention are suitable linked to one or more serum proteins or fragments thereof (such as (human) serum albumin or suitable fragments thereof) or to one or more binding units that can bind to serum proteins (such as, for example, domain antibodies, amino acid sequences that are suitable for use as a domain antibody, single domain antibodies, amino acid sequences that are suitable for use as a single domain antibody, “dAb”'s, amino acid sequences that are suitable for use as a dAb, or Nanobodies that can bind to serum proteins such as serum albumin (such as human serum albumin), serum immunoglobulins such as IgG, or transferrin; reference is made to the further description and references mentioned herein); polypeptides in which an amino acid sequence of the invention is linked to an Fc portion (such as a human Fc) or a suitable part or fragment thereof; or polypeptides in which the one or more amino acid sequences of the invention are suitable linked to one or more small proteins or peptides that can bind to serum proteins (such as, without limitation, the proteins and peptides described in WO 91/01743, WO 01/45746, WO 02/076489 and to the US provisional application of Ablynx N.V. entitled “Peptides capable of binding to serum proteins” of Ablynx N.V. filed on Dec. 5, 2006 (see also PCT/EP2007/063348).

[0247] Generally, the compounds or polypeptides of the invention with increased half-life preferably have a half-life that is at least 1.5 times, preferably at least 2 times, such as at least 5 times, for example at least 10 times or more than 20 times, greater than the half-life of the corresponding amino acid sequence of the invention per se. For example, the compounds or polypeptides of the invention with increased half-life may have a half-life that is increased with more than 1 hours, preferably more than 2 hours, more preferably more than 6 hours, such as more than 12 hours, or even more than 24, 48 or 72 hours, compared to the corresponding amino acid sequence of the invention per se.

[0248] In a preferred, but non-limiting aspect of the invention, such compounds or polypeptides of the invention have a serum half-life that is increased with more than 1 hours, preferably more than 2 hours, more preferably more than 6 hours, such as more than 12 hours, or even more than 24, 48 or 72 hours, compared to the corresponding amino acid sequence of the invention per se.

[0249] In another preferred, but non-limiting aspect of the invention, such compounds or polypeptides of the invention exhibit a serum half-life in human of at least about 12 hours, preferably at least 24 hours, more preferably at least 48 hours, even more preferably at least 72 hours or more. For example, compounds or polypeptides of the invention may have a half-life of at least 5 days (such as about 5 to 10 days), preferably at least 9 days (such as about 9 to 14 days), more preferably at least about 10 days (such as about 10 to 15 days), or at least about 11 days (such as about 11 to 16 days), more preferably at least about 12 days (such as about 12 to 18 days or more), or more than 14 days (such as about 14 to 19 days).

[0250] In another aspect, the invention relates to a nucleic acid that encodes an amino acid sequence of the invention or a polypeptide of the invention (or a suitable fragment thereof). Such a nucleic acid will also be referred to herein as a “nucleic acid of the invention” and may for example be in the form of a genetic construct, as further described herein.

[0251] In another aspect, the invention relates to a host or host cell that expresses (or that under suitable circumstances is capable of expressing) an amino acid sequence of the invention and/or a polypeptide of the invention; and/or that contains a nucleic acid of the invention. Some preferred but non-limiting examples of such hosts or host cells will become clear from the further description herein.

[0252] The invention further relates to a product or composition containing or comprising at least one amino acid sequence of the invention, at least one polypeptide of the invention (or a suitable fragment thereof) and/or at least one nucleic acid of the invention, and optionally one or more further components of such compositions known per se, i.e. depending on the intended use of the composition. Such a product or composition may for example be a pharmaceutical composition (as described herein), a veterinary composition or a product or composition for diagnostic use (as also described herein). Some preferred but non-limiting examples of such products or compositions will become clear from the further description herein.

[0253] The invention also relates to the use of an amino acid sequence, Nanobody or polypeptide of the invention, or of a composition comprising the same, in (methods or compositions for) modulating RANK-L, either in vitro (e.g. in an in vitro or cellular assay) or in vivo (e.g. in an a single cell or in a multicellular organism, and in particular in a mammal, and more in particular in a human being, such as in a human being that is at risk of or suffers from a bone disease or disorder).

[0254] The invention also relates to methods for modulating RANK-L, either in vitro (e.g. in an in vitro or cellular assay) or in vivo (e.g. in an a single cell or multicellular organism, and in particular in a mammal, and more in particular in a human being, such as in a human being that is at risk of or suffers from a bone disease or disorder), which method comprises at least the step of contacting RANK-L with at least one amino acid sequence, Nanobody or polypeptide of the invention, or with a composition comprising the same, in a manner and in an amount suitable to modulate RANK-L, with at least one amino acid sequence, Nanobody or polypeptide of the invention.

[0255] The invention also relates to the use of an one amino acid sequence, Nanobody or polypeptide of the invention in the preparation of a composition (such as, without limitation, a pharmaceutical composition or preparation as further described herein) for modulating RANK-L, either in vitro (e.g. in an in vitro or cellular assay) or in vivo (e.g. in an a single cell or multicellular organism, and in particular in a mammal, and more in particular in a human being, such as in a human being that is at risk of or suffers from a bone disease or disorder).

[0256] In the context of the present invention, “modulating” or “to modulate” generally means either reducing or inhibiting the activity of, or alternatively increasing the activity of, RANK-L, as measured using a suitable in vitro, cellular or in vivo assay (such as those mentioned herein). In particular, “modulating” or “to modulate” may mean either reducing or inhibiting the activity of, or alternatively increasing the activity of RANK-L, as measured using a suitable in vitro, cellular or in vivo assay (such as those mentioned herein), by at least 1%, preferably at least 5%, such as at least 10% or at least 25%, for example by at least 50%, at least 60%, at least 70%, at least 80%, or 90% or more, compared to activity of RANK-L in the same assay under the same conditions but without the presence of the amino acid sequence, Nanobody or polypeptide of the invention.

[0257] As will be clear to the skilled person, “modulating” may also involve effecting a change (which may either be an increase or a decrease) in affinity, avidity, specificity and/or selectivity of RANK-L for one or more of its targets, ligands or substrates; and/or effecting a change (which may either be an increase or a decrease) in the sensitivity of RANK-L for one or more conditions in the medium or surroundings in which RANK-L is present (such as pH, ion strength, the presence of co-factors, etc.), compared to the same conditions but without the presence of the amino acid sequence, Nanobody or polypeptide of the invention. As will be clear to the skilled person, this may again be determined in any suitable manner and/or using any suitable assay known per se, such as the assays described herein or in the prior art cited herein.

[0258] “Modulating” may also mean effecting a change (i.e. an activity as an agonist or as an antagonist, respectively) with respect to one or more biological or physiological mechanisms, effects, responses, functions, pathways or activities in which RANK-L (or in which its substrate(s), ligand(s) or pathway(s) are involved, such as its signalling pathway or metabolic pathway and their associated biological or physiological effects) is involved. Again, as will be clear to the skilled person, such an action as an agonist or an antagonist may be determined in any suitable manner and/or using any suitable (in vitro and usually cellular or in assay) assay known per se, such as the assays described herein or in the prior art cited herein. In particular, an action as an agonist or antagonist may be such that an intended biological or physiological activity is increased or decreased, respectively, by at least 1%, preferably at least 5%, such as at least 10% or at least 25%, for example by at least 50%, at least 60%, at least 70%, at least 80%, or 90% or more, compared to the biological or physiological activity in the same assay under the same conditions but without the presence of the amino acid sequence, Nanobody or polypeptide of the invention.

[0259] Modulating may for example involve reducing or inhibiting the binding of RANK-L to one of its substrates or ligands and/or competing with a natural ligand, substrate for binding to RANK-L. Modulating may also involve activating RANK-L or the mechanism or pathway in which it is involved. Modulating may be reversible or irreversible, but for pharmaceutical and pharmacological purposes will usually be in a reversible manner.

[0260] The invention further relates to methods for preparing or generating the amino acid sequences, polypeptides, nucleic acids, host cells, products and compositions described herein. Some preferred but non-limiting examples of such methods will become clear from the further description herein.

[0261] Generally, these methods may comprise the steps of:
[0262] a) providing a set, collection or library of amino acid sequences; and
[0263] b) screening said set, collection or library of amino acid sequences for amino acid sequences that can bind to and/or have affinity for RANK-L;
   and
[0264] c) isolating the amino acid sequence(s) that can bind to and/or have affinity for RANK-L.

[0265] In such a method, the set, collection or library of amino acid sequences may be any suitable set, collection or library of amino acid sequences. For example, the set, collection or library of amino acid sequences may be a set, collection or library of immunoglobulin sequences (as described herein), such as a naïve set, collection or library of immunoglobulin sequences; a synthetic or semi-synthetic set, collection or library of immunoglobulin sequences; and/or a set, collection or library of immunoglobulin sequences that have been subjected to affinity maturation.

[0266] Also, in such a method, the set, collection or library of amino acid sequences may be a set, collection or library of heavy chain variable domains (such as V_{H} domains or V_{HH} domains) or of light chain variable domains. For example, the set, collection or library of amino acid sequences may be a set, collection or library of domain antibodies or single domain antibodies, or may be a set, collection or library of amino acid sequences that are capable of functioning as a domain antibody or single domain antibody.

[0267] In a preferred aspect of this method, the set, collection or library of amino acid sequences may be an immune set, collection or library of immunoglobulin sequences, for example derived from a mammal that has been suitably immunized with RANK-L or with a suitable antigenic determinant based thereon or derived therefrom, such as an antigenic part, fragment, region, domain, loop or other epitope thereof. In one particular aspect, said antigenic determinant may be an extracellular part, region, domain, loop or other extracellular epitope(s).

[0268] In the above methods, the set, collection or library of amino acid sequences may be displayed on a phage, phagemid, ribosome or suitable micro-organism (such as yeast), such as to facilitate screening. Suitable methods, techniques and host organisms for displaying and screening (a set, collection or library of) amino acid sequences will be clear to the person skilled in the art, for example on the basis of the further disclosure herein. Reference is also made to the review by Hoogenboom in Nature Biotechnology, 23, 9, 1105-1116 (2005).

[0269] In another aspect, the method for generating amino acid sequences comprises at least the steps of:
[0270] a) providing a collection or sample of cells expressing amino acid sequences;
[0271] b) screening said collection or sample of cells for cells that express an amino acid sequence that can bind to and/or have affinity for RANK-L;
   and
[0272] c) either (i) isolating said amino acid sequence; or (ii) isolating from said cell a nucleic acid sequence that encodes said amino acid sequence, followed by expressing said amino acid sequence.

[0273] For example, when the desired amino acid sequence is an immunoglobulin sequence, the collection or sample of cells may for example be a collection or sample of B-cells. Also, in this method, the sample of cells may be derived from a mammal that has been suitably immunized with RANK-L or with a suitable antigenic determinant based thereon or derived therefrom, such as an antigenic part, fragment, region, domain, loop or other epitope thereof. In one particular aspect, said antigenic determinant may be an extracellular part, region, domain, loop or other extracellular epitope(s).

[0274] The above method may be performed in any suitable manner, as will be clear to the skilled person. Reference is for example made to EP 0 542 810, WO 05/19824, WO 04/051268 and WO 04/106377. The screening of step b) is preferably performed using a flow cytometry technique such as FACS. For this, reference is for example made to Lieby et al., Blood, Vol. 97, No. 12, 3820 (2001).

[0275] In another aspect, the method for generating an amino acid sequence directed against RANK-L may comprise at least the steps of:
[0276] a) providing a set, collection or library of nucleic acid sequences encoding amino acid sequences;
[0277] b) screening said set, collection or library of nucleic acid sequences for nucleic acid sequences that encode an amino acid sequence that can bind to and/or has affinity for RANK-L;
   and
[0278] c) isolating said nucleic acid sequence, followed by expressing said amino acid sequence.

[0279] In such a method, the set, collection or library of nucleic acid sequences encoding amino acid sequences may for example be a set, collection or library of nucleic acid sequences encoding a naïve set, collection or library of immunoglobulin sequences; a set, collection or library of nucleic acid sequences encoding a synthetic or semi-synthetic set, collection or library of immunoglobulin sequences; and/or a set, collection or library of nucleic acid sequences encoding a set, collection or library of immunoglobulin sequences that have been subjected to affinity maturation.

[0280] Also, in such a method, the set, collection or library of nucleic acid sequences may encode a set, collection or library of heavy chain variable domains (such as V_{H} domains or V_{HH} domains) or of light chain variable domains. For example, the set, collection or library of nucleic acid sequences may encode a set, collection or library of domain antibodies or single domain antibodies, or a set, collection or library of amino acid sequences that are capable of functioning as a domain antibody or single domain antibody.

[0281] In a preferred aspect of this method, the set, collection or library of amino acid sequences may be an immune set, collection or library of nucleic acid sequences, for example derived from a mammal that has been suitably immunized with RANK-L or with a suitable antigenic determinant based thereon or derived therefrom, such as an antigenic part, fragment, region, domain, loop or other epitope thereof. In one particular aspect, said antigenic determinant may be an extracellular part, region, domain, loop or other extracellular epitope(s).

[0282] The set, collection or library of nucleic acid sequences may for example encode an immune set, collection or library of heavy chain variable domains or of light chain variable domains. In one specific aspect, the set, collection or library of nucleotide sequences may encode a set, collection or library of V_{HH} sequences.

[0283] In the above methods, the set, collection or library of nucleotide sequences may be displayed on a phage, phagemid, ribosome or suitable micro-organism (such as yeast), such as to facilitate screening. Suitable methods, techniques and host organisms for displaying and screening (a set, collection or library of) nucleotide sequences encoding amino acid sequences will be clear to the person skilled in the art, for example on the basis of the further disclosure herein. Reference is also made to the review by Hoogenboom in Nature Biotechnology, 23, 9, 1105-1116 (2005).

[0284] In another aspect, the method for generating an amino acid sequence directed against RANK-L may comprise at least the steps of:
[0285] a) providing a set, collection or library of nucleic acid sequences encoding amino acid sequences;
[0286] b) screening said set, collection or library of nucleic acid sequences for nucleic acid sequences that encode an amino acid sequence that can bind to and/or has affinity for RANK-L and that is cross-blocked or is cross blocking a Nanobody of the invention, e.g. SEQ ID NO's: 560-621, or a humanized Nanobody of the invention, e.g. SEQ ID NO's: 730-757 and 765, or a polypeptide or construct of the invention, e.g. SEQ ID NO's: 622-729, 759-762 and 766-789; and
[0287] c) isolating said nucleic acid sequence, followed by expressing said amino acid sequence.

[0288] The invention also relates to amino acid sequences that are obtained by the above methods, or alternatively by a method that comprises the one of the above methods and in addition at least the steps of determining the nucleotide sequence or amino acid sequence of said immunoglobulin sequence; and of expressing or synthesizing said amino acid sequence in a manner known per se, such as by expression in a suitable host cell or host organism or by chemical synthesis.

[0289] Also, following the steps above, one or more amino acid sequences of the invention may be suitably humanized (or alternatively camelized); and/or the amino acid sequence(s) thus obtained may be linked to each other or to one or more other suitable amino acid sequences (optionally via one or more suitable linkers) so as to provide a polypeptide of the invention. Also, a nucleic acid sequence encoding an amino acid sequence of the invention may be suitably humanized (or alternatively camelized) and suitably expressed; and/or one or more nucleic acid sequences encoding an amino acid sequence of the invention may be linked to each other or to one or more nucleic acid sequences that encode other suitable amino acid sequences (optionally via nucleotide sequences that encode one or more suitable linkers), after which the nucleotide sequence thus obtained may be suitably expressed so as to provide a polypeptide of the invention.

[0290] The invention further relates to applications and uses of the amino acid sequences, compounds, constructs, polypeptides, nucleic acids, host cells, products and compositions described herein, as well as to methods for the prevention and/or treatment for diseases and disorders associated with RANK-L. Some preferred but non-limiting applications and uses will become clear from the further description herein.

[0291] The invention also relates to the amino acid sequences, compounds, constructs, polypeptides, nucleic acids, host cells, products and compositions described herein for use in therapy.

[0292] In particular, the invention also relates to the amino acid sequences, compounds, constructs, polypeptides, nucleic acids, host cells, products and compositions described herein for use in therapy of a disease or disorder that can be prevented or treated by administering, to a subject in need thereof, of (a pharmaceutically effective amount of) an amino acid sequence, compound, construct or polypeptide as described herein.

[0293] More in particular, the invention relates to the amino acid sequences, compounds, constructs, polypeptides, nucleic acids, host cells, products and compositions described herein for use in therapy of bone diseases and disorders.

[0294] Other aspects, embodiments, advantages and applications of the invention will also become clear from the further description herein, in which the invention will be described and discussed in more detail with reference to the Nanobodies of the invention and polypeptides of the invention comprising the same, which form some of the preferred aspects of the invention.

[0295] As will become clear from the further description herein, Nanobodies generally offer certain advantages (outlined herein) compared to “dAb's” or similar (single) domain antibodies or immunoglobulin sequences, which advantages are also provided by the Nanobodies of the invention. However, it will be clear to the skilled person that the more general aspects of the teaching below can also be applied (either directly or analogously) to other amino acid sequences of the invention.

### DETAILED DESCRIPTION OF THE INVENTION

[0296] In the present description, examples and claims:
[0297] a) Unless indicated or defined otherwise, all terms used have their usual meaning in the art, which will be clear to the skilled person. Reference is for example made to the standard handbooks, such as Sambrook et al, “Molecular Cloning: A Laboratory Manual” (2nd. Ed.), Vols. 1-3, Cold Spring Harbor Laboratory Press (1989); F. Ausubel et al, eds., “Current protocols in molecular biology”, Green Publishing and Wiley Interscience, New York (1987); Lewin, “Genes II”, John Wiley & Sons, New York, N.Y., (1985); Old et al., “Principles of Gene Manipulation: An Introduction to Genetic Engineering”, 2nd edition, University of California Press, Berkeley, Calif. (1981); Roitt et al., “Immunology” (6th. Ed.), Mosby/Elsevier, Edinburgh (2001); Roitt et al., Roitt's Essential Immunology, 10^{th} Ed. Blackwell Publishing, UK (2001); and Janeway et al., “Immunobiology” (6th Ed.), Garland Science Publishing/Churchill Livingstone, New York (2005), as well as to the general background art cited herein;
[0298] b) Unless indicated otherwise, the term “immunoglobulin sequence”—whether used herein to refer to a heavy chain antibody or to a conventional 4-chain antibody—is used as a general term to include both the full-size antibody, the individual chains thereof, as well as all parts, domains or fragments thereof (including but not limited to antigen-binding domains or fragments such as V_{HH} domains or V_{H}/V_{L} domains, respectively). In addition, the term “sequence” as used herein (for example in terms like “immunoglobulin sequence”, “antibody sequence”, “variable domain sequence”, “V_{HH} sequence” or “protein sequence”), should generally be understood to include both the relevant amino acid sequence as well as nucleic acid sequences or nucleotide sequences encoding the same, unless the context requires a more limited interpretation;
[0299] c) Unless indicated otherwise, all methods, steps, techniques and manipulations that are not specifically described in detail can be performed and have been performed in a manner known per se, as will be clear to the skilled person. Reference is for example again made to the standard handbooks and the general background art mentioned herein and to the further references cited therein; as well as to for example the following reviews Presta, Adv. Drug Deliv. Rev. 2006, 58 (5-6): 640-56; Levin and Weiss, Mol. Biosyst. 2006, 2(1): 49-57; Irving et al., J. Immunol. Methods, 2001, 248(1-2), 31-45; Schmitz et al., Placenta, 2000, 21 Suppl. A, S106-12, Gonzales et al., Tumour Biol., 2005, 26(1), 31-43, which describe techniques for protein engineering, such as affinity maturation and other techniques for improving the specificity and other desired properties of proteins such as immunoglobulins.
[0300] d) Amino acid residues will be indicated according to the standard three-letter or one-letter amino acid code, as mentioned in Table A-2;

TABLE A-2
one-letter and three-letter amino acid code

| | | | |
|---|---|---|---|
| Nonpolar, | Alanine | Ala | A |
| uncharged | Valine | Val | V |
| (at pH 6.0-7.0)⁽³⁾ | Leucine | Leu | L |
| | Isoleucine | Ile | I |
| | Phenylalanine | Phe | F |
| | Methionine⁽¹⁾ | Met | M |
| | Tryptophan | Trp | W |
| | Proline | Pro | P |
| Polar, | Glycine⁽²⁾ | Gly | G |
| uncharged | Serine | Ser | S |
| (at pH 6.0-7.0) | Threonine | Thr | T |
| | Cysteine | Cys | C |
| | Asparagine | Asn | N |
| | Glutamine | Gln | Q |
| | Tyrosine | Tyr | Y |
| Polar, | Lysine | Lys | K |
| charged | Arginine | Arg | R |
| (at pH 6.0-7.0) | Histidine⁽⁴⁾ | His | H |
| | Aspartate | Asp | D |
| | Glutamate | Glu | E |

Notes:
⁽¹⁾Sometimes also considered to be a polar uncharged amino acid.
⁽²⁾Sometimes also considered to be a nonpolar uncharged amino acid.
⁽³⁾As will be clear to the skilled person, the fact that an amino acid residue is referred to in this Table as being either charged or uncharged at pH 6.0 to 7.0 does not reflect in any way on the charge said amino acid residue may have at a pH lower than 6.0 and/or at a pH higher than 7.0; the amino acid residues mentioned in the Table can be either charged and/or uncharged at such a higher or lower pH, as will be clear to the skilled person.
⁽⁴⁾As is known in the art, the charge of a His residue is greatly dependant upon even small shifts in pH, but a His residue can generally be considered essentially uncharged at a pH of about 6.5.

[0301] e) For the purposes of comparing two or more nucleotide sequences, the percentage of “sequence identity” between a first nucleotide sequence and a second nucleotide sequence may be calculated by dividing [the number of nucleotides in the first nucleotide sequence that are identical to the nucleotides at the corresponding positions in the second nucleotide sequence] by [the total number of nucleotides in the first nucleotide sequence] and multiplying by [100%], in which each deletion, insertion, substitution or addition of a nucleotide in the second nucleotide sequence—compared to the first nucleotide sequence—is considered as a difference at a single nucleotide (position).
   [0302] Alternatively, the degree of sequence identity between two or more nucleotide sequences may be calculated using a known computer algorithm for sequence alignment such as NCBI Blast v2.0, using standard settings.
   [0303] Some other techniques, computer algorithms and settings for determining the degree of sequence identity are for example described in WO 04/037999, EP 0 967 284, EP 1 085 089, WO 00/55318, WO 00/78972, WO 98/49185 and GB 2 357 768-A.
   [0304] Usually, for the purpose of determining the percentage of “sequence identity” between two nucleotide sequences in accordance with the calculation method outlined hereinabove, the nucleotide sequence with the greatest number of nucleotides will be taken as the “first” nucleotide sequence, and the other nucleotide sequence will be taken as the “second” nucleotide sequence;
[0305] f) For the purposes of comparing two or more amino acid sequences, the percentage of “sequence identity” between a first amino acid sequence and a second amino acid sequence (also referred to herein as “amino acid identity”) may be calculated by dividing [the number of amino acid residues in the first amino acid sequence that are identical to the amino acid residues at the corresponding positions in the second amino acid sequence] by [the total number of amino acid residues in the first amino acid sequence] and multiplying by [100%], in which each deletion, insertion, substitution or addition of an amino acid residue in the second amino acid sequence—compared to the first amino acid sequence—is considered as a difference at a single amino acid residue (position), i.e. as an “amino acid difference” as defined herein.
   [0306] Alternatively, the degree of sequence identity between two amino acid sequences may be calculated using a known computer algorithm, such as those mentioned above for determining the degree of sequence identity for nucleotide sequences, again using standard settings.
   [0307] Usually, for the purpose of determining the percentage of “sequence identity” between two amino acid sequences in accordance with the calculation method outlined hereinabove, the amino acid sequence with the greatest number of amino acid residues will be taken as the “first” amino acid sequence, and the other amino acid sequence will be taken as the “second” amino acid sequence.
   [0308] Also, in determining the degree of sequence identity between two amino acid sequences, the skilled person may take into account so-called “conservative” amino acid substitutions, which can generally be described as amino acid substitutions in which an amino acid residue is replaced with another amino acid residue of similar chemical structure and which has little or essentially no influence on the function, activity or other biological properties of the polypeptide. Such conservative amino acid substitutions are well known in the art, for example from WO 04/037999, GB-A-3 357 768, WO 98/49185, WO 00/46383 and WO 01/09300; and (preferred) types and/or combinations of such substitutions may be selected on the basis of the pertinent teachings from WO 04/037999 as well as WO 98/49185 and from the further references cited therein.
   [0309] Such conservative substitutions preferably are substitutions in which one amino acid within the following groups (a)-(e) is substituted by another amino acid residue within the same group: (a) small aliphatic, nonpolar or slightly polar residues: Ala, Ser, Thr, Pro and Gly; (b) polar, negatively charged residues and their (uncharged) amides: Asp, Asn, Glu and Gln; (c) polar, positively charged residues: His, Arg and Lys; (d) large aliphatic, nonpolar residues: Met, Leu, Ile, Val and Cys; and (e) aromatic residues: Phe, Tyr and Trp.
   [0310] Particularly preferred conservative substitutions are as follows: Ala into Gly or into Ser; Arg into Lys; Asn into Gln or into His; Asp into Glu; Cys into Ser; Gln into Asn; Glu into Asp; Gly into Ala or into Pro; His into Asn or into Gln; Ile into Leu or into Val; Leu into Ile or into Val; Lys into Arg, into Gln or into Glu; Met into Leu, into Tyr or into Ile; Phe into Met, into Leu or into Tyr; Ser into Thr; Thr into Ser; Trp into Tyr; Tyr into Trp; and/or Phe into Val, into Ile or into Leu.
   [0311] Any amino acid substitutions applied to the polypeptides described herein may also be based on the analysis of the frequencies of amino acid variations between homologous proteins of different species developed by Schulz et al., Principles of Protein Structure, Springer-Verlag, 1978, on the analyses of structure forming potentials developed by Chou and Fasman, Biochemistry 13: 211, 1974 and Adv. Enzymol., 47: 45-149, 1978, and on the analysis of hydrophobicity patterns in proteins developed by Eisenberg et al., Proc. Natl. Acad. Sci. USA 81: 140-144, 1984; Kyte & Doolittle; J Molec. Biol. 157: 105-132, 198 1, and Goldman et al., Ann. Rev. Biophys. Chem. 15: 321-353, 1986, all incorporated herein in their entirety by reference. Information on the primary, secondary and tertiary structure of Nanobodies is given in the description herein and in the general background art cited above. Also, for this purpose, the crystal structure of a V_{HH} domain from a llama is for example given by Desmyter et al., Nature Structural Biology, Vol. 3, 9, 803 (1996); Spinelli et al., Natural Structural Biology (1996); 3, 752-757; and Decanniere et al., Structure, Vol. 7, 4, 361 (1999). Further information about some of the amino acid residues that in conventional V_{H} domains form the V_{H}/V_{L} interface and potential camelizing substitutions on these positions can be found in the prior art cited above.
[0312] g) Amino acid sequences and nucleic acid sequences are said to be “exactly the same” if they have 100% sequence identity (as defined herein) over their entire length;
[0313] h) When comparing two amino acid sequences, the term “amino acid difference” refers to an insertion, deletion or substitution of a single amino acid residue on a position of the first sequence, compared to the second sequence; it being understood that two amino acid sequences can contain one, two or more such amino acid differences;
[0314] i) When a nucleotide sequence or amino acid sequence is said to “comprise” another nucleotide sequence or amino acid sequence, respectively, or to “essentially consist of” another nucleotide sequence or amino acid sequence, this may mean that the latter nucleotide sequence or amino acid sequence has been incorporated into the firstmentioned nucleotide sequence or amino acid sequence, respectively, but more usually this generally means that the firstmentioned nucleotide sequence or amino acid sequence comprises within its sequence a stretch of nucleotides or amino acid residues, respectively, that has the same nucleotide sequence or amino acid sequence, respectively, as the latter sequence, irrespective of how the firstmentioned sequence has actually been generated or obtained (which may for example be by any suitable method described herein). By means of a non-limiting example, when a Nanobody of the invention is said to comprise a CDR sequence, this may mean that said CDR sequence has been incorporated into the Nanobody of the invention, but more usually this generally means that the Nanobody of the invention contains within its sequence a stretch of amino acid residues with the same amino acid sequence as said CDR sequence, irrespective of how said Nanobody of the invention has been generated or obtained. It should also be noted that when the latter amino acid sequence has a specific biological or structural function, it preferably has essentially the same, a similar or an equivalent biological or structural function in the firstmentioned amino acid sequence (in other words, the firstmentioned amino acid sequence is preferably such that the latter sequence is capable of performing essentially the same, a similar or an equivalent biological or structural function). For example, when a Nanobody of the invention is said to comprise a CDR sequence or framework sequence, respectively, the CDR sequence and framework are preferably capable, in said Nanobody, of functioning as a CDR sequence or framework sequence, respectively. Also, when a nucleotide sequence is said to comprise another nucleotide sequence, the firstmentioned nucleotide sequence is preferably such that, when it is expressed into an expression product (e.g. a polypeptide), the amino acid sequence encoded by the latter nucleotide sequence forms part of said expression product (in other words, that the latter nucleotide sequence is in the same reading frame as the firstmentioned, larger nucleotide sequence).
[0315] j) A nucleic acid sequence or amino acid sequence is considered to be “(in) essentially isolated (form)”—for example, compared to its native biological source and/or the reaction medium or cultivation medium from which it has been obtained—when it has been separated from at least one other component with which it is usually associated in said source or medium, such as another nucleic acid, another protein/polypeptide, another biological component or macromolecule or at least one contaminant, impurity or minor component. In particular, a nucleic acid sequence or amino acid sequence is considered “essentially isolated” when it has been purified at least 2-fold, in particular at least 10-fold, more in particular at least 100-fold, and up to 1000-fold or more. A nucleic acid sequence or amino acid sequence that is “in essentially isolated form” is preferably essentially homogeneous, as determined using a suitable technique, such as a suitable chromatographical technique, such as polyacrylamide-gel electrophoresis;
[0316] k) The term “domain” as used herein generally refers to a globular region of an amino acid sequence (such as an antibody chain, and in particular to a globular region of a heavy chain antibody), or to a polypeptide that essentially consists of such a globular region. Usually, such a domain will comprise peptide loops (for example 3 or 4 peptide loops) stabilized, for example, as a sheet or by disulfide bonds. The term “binding domain” refers to such a domain that is directed against an antigenic determinant (as defined herein);
[0317] l) The term “antigenic determinant” refers to the epitope on the antigen recognized by the antigen-binding molecule (such as a Nanobody or a polypeptide of the invention) and more in particular by the antigen-binding site of said molecule. The terms “antigenic determinant” and “epitope” may also be used interchangeably herein.
[0318] m) An amino acid sequence (such as a Nanobody, an antibody, a polypeptide of the invention, or generally an antigen binding protein or polypeptide or a fragment thereof) that can (specifically) bind to, that has affinity for and/or that has specificity for a specific antigenic determinant, epitope, antigen or protein (or for at least one part, fragment or epitope thereof) is said to be “against” or “directed against” said antigenic determinant, epitope, antigen or protein.
[0319] n) The term “specificity” refers to the number of different types of antigens or antigenic determinants to which a particular antigen-binding molecule or antigen-binding protein (such as a Nanobody or a polypeptide of the invention) molecule can bind. The specificity of an antigen-binding protein can be determined based on affinity and/or avidity. The affinity, represented by the equilibrium constant for the dissociation of an antigen with an antigen-binding protein (K_{D}), is a measure for the binding strength between an antigenic determinant and an antigen-binding site on the antigen-binding protein: the lesser the value of the K_{D}, the stronger the binding strength between an antigenic determinant and the antigen-binding molecule (alternatively, the affinity can also be expressed as the affinity constant (K_{A}), which is 1/K_{D}). As will be clear to the skilled person (for example on the basis of the further disclosure herein), affinity can be determined in a manner known per se, depending on the specific antigen of interest. Avidity is the measure of the strength of binding between an antigen-binding molecule (such as a Nanobody or polypeptide of the invention) and the pertinent antigen. Avidity is related to both the affinity between an antigenic determinant and its antigen binding site on the antigen-binding molecule and the number of pertinent binding sites present on the antigen-binding molecule. Typically, antigen-binding proteins (such as the amino acid sequences, Nanobodies and/or polypeptides of the invention) will bind to their antigen with a dissociation constant (K_{D}) of 10⁻⁵ to 10⁻¹² moles/liter or less, and preferably 10⁻⁷ to 10⁻¹² moles/liter or less and more preferably 10⁻⁸ to 10⁻¹² moles/liter (i.e. with an association constant (K_{A}) of 10⁵ to 10¹² liter/moles or more, and preferably 10⁷ to 10¹² liter/moles or more and more preferably 10⁸ to 10¹² liter/moles). Any K_{D} value greater than 10⁴ mol/liter (or any K_{A} value lower than 10⁴ M⁻¹) liters/mol is generally considered to indicate non-specific binding. Preferably, a monovalent immunoglobulin sequence of the invention will bind to the desired antigen with an affinity less than 500 nM, preferably less than 200 nM, more preferably less than 10 nM, such as less than 500 pM. Specific binding of an antigen-binding protein to an antigen or antigenic determinant can be determined in any suitable manner known per se, including, for example, Scatchard analysis and/or competitive binding assays, such as radioimmunoassays (RIA), enzyme immunoassays (EIA) and sandwich competition assays, and the different variants thereof known per se in the art; as well as the other techniques mentioned herein.
   [0320] The dissociation constant may be the actual or apparent dissociation constant, as will be clear to the skilled person. Methods for determining the dissociation constant will be clear to the skilled person, and for example include the techniques mentioned herein. In this respect, it will also be clear that it may not be possible to measure dissociation constants of more then 10⁻⁴ moles/liter or 10⁻³ moles/liter (e.g., of 10⁻² moles/liter). Optionally, as will also be clear to the skilled person, the (actual or apparent) dissociation constant may be calculated on the basis of the (actual or apparent) association constant (K_{A}), by means of the relationship [K_{D}=1/K_{A}].
   [0321] The affinity denotes the strength or stability of a molecular interaction. The affinity is commonly given as by the K_{D}, or dissociation constant, which has units of mol/liter (or M). The affinity can also be expressed as an association constant, K_{A}, which equals 1/K_{D} and has units of (mol/liter)⁻¹ (or M⁻¹). In the present specification, the stability of the interaction between two molecules (such as an amino acid sequence, Nanobody or polypeptide of the invention and its intended target) will mainly be expressed in terms of the K_{D} value of their interaction; it being clear to the skilled person that in view of the relation K_{A}=1/K_{D}, specifying the strength of molecular interaction by its K_{D} value can also be used to calculate the corresponding K_{A} value. The K_{D}-value characterizes the strength of a molecular interaction also in a thermodynamic sense as it is related to the free energy (DG) of binding by the well known relation DG=RT·ln(K_{D}) (equivalently DG=−RT·ln(K_{A})), where R equals the gas constant, T equals the absolute temperature and In denotes the natural logarithm.
   [0322] The K_{D} for biological interactions which are considered meaningful (e.g. specific) are typically in the range of 10⁻¹° M (0.1 nM) to 10⁻⁵M (10000 nM). The stronger an interaction is, the lower is its K_{D}.
   [0323] The K_{D} can also be expressed as the ratio of the dissociation rate constant of a complex, denoted as k_{off}, to the rate of its association, denoted kₒₙ (so that K_{D}=k_{off}/kₒₙ and K_{A}=kₒₙ/k_{off}). The off-rate k_{off} has units s⁻¹ (where s is the SI unit notation of second). The on-rate kₒₙ has units M⁻¹s⁻¹. The on-rate may vary between 10² M⁻¹s⁻¹ to about 10⁷ M⁻¹s⁻¹, approaching the diffusion-limited association rate constant for bimolecular interactions. The off-rate is related to the half-life of a given molecular interaction by the relation t_{1/2}=ln(2)/k_{off}. The off-rate may vary between 10⁻⁶ s⁻¹ (near irreversible complex with a t_{1/2} of multiple days) to 1 s⁻¹ (t_{1/2}=0.69 s).
   [0324] The affinity of a molecular interaction between two molecules can be measured via different techniques known per se, such as the well known surface plasmon resonance (SPR) biosensor technique (see for example Ober et al., Intern. Immunology, 13, 1551-1559, 2001) where one molecule is immobilized on the biosensor chip and the other molecule is passed over the immobilized molecule under flow conditions yielding kₒₙ, k_{off} measurements and hence K_{D} (or K_{A}) values. This can for example be performed using the well-known BIACORE instruments.
   [0325] It will also be clear to the skilled person that the measured K_{D} may correspond to the apparent K_{D} if the measuring process somehow influences the intrinsic binding affinity of the implied molecules for example by artefacts related to the coating on the biosensor of one molecule. Also, an apparent K_{D} may be measured if one molecule contains more than one recognition sites for the other molecule. In such situation the measured affinity may be affected by the avidity of the interaction by the two molecules.
   [0326] Another approach that may be used to assess affinity is the 2-step ELISA (Enzyme-Linked Immunosorbent Assay) procedure of Friguet et al. (J. Immunol. Methods, 77, 305-19, 1985). This method establishes a solution phase binding equilibrium measurement and avoids possible artefacts relating to adsorption of one of the molecules on a support such as plastic.
   [0327] However, the accurate measurement of K_{D} may be quite labor-intensive and as consequence, often apparent K_{D} values are determined to assess the binding strength of two molecules. It should be noted that as long all measurements are made in a consistent way (e.g. keeping the assay conditions unchanged) apparent K_{D} measurements can be used as an approximation of the true K_{D} and hence in the present document K_{D} and apparent K_{D} should be treated with equal importance or relevance. Finally, it should be noted that in many situations the experienced scientist may judge it to be convenient to determine the binding affinity relative to some reference molecule. For example, to assess the binding strength between molecules A and B, one may e.g. use a reference molecule C that is known to bind to B and that is suitably labelled with a fluorophore or chromophore group or other chemical moiety, such as biotin for easy detection in an ELISA or FACS (Fluorescent activated cell sorting) or other format (the fluorophore for fluorescence detection, the chromophore for light absorption detection, the biotin for streptavidin-mediated ELISA detection). Typically, the reference molecule C is kept at a fixed concentration and the concentration of A is varied for a given concentration or amount of B. As a result an IC₅₀ value is obtained corresponding to the concentration of A at which the signal measured for C in absence of A is halved. Provided K_{D ref}, the K_{D} of the reference molecule, is known, as well as the total concentration c_{ref} of the reference molecule, the apparent K_{D} for the interaction A-B can be obtained from following formula: K_{D}=IC₅₀/(1+c_{ref}/K_{D ref}). Note that if c_{ref}<<K_{D ref}, K_{D}≈IC₅₀. Provided the measurement of the IC₅₀ is performed in a consistent way (e.g. keeping c_{ref} fixed) for the binders that are compared, the strength or stability of a molecular interaction can be assessed by the IC₅₀ and this measurement is judged as equivalent to K_{D} or to apparent K_{D} throughout this text.
[0328] o) The half-life of an amino acid sequence, compound or polypeptide of the invention can generally be defined as the time taken for the serum concentration of the amino acid sequence, compound or polypeptide to be reduced by 50%, in vivo, for example due to degradation of the sequence or compound and/or clearance or sequestration of the sequence or compound by natural mechanisms. The in vivo half-life of an amino acid sequence, compound or polypeptide of the invention can be determined in any manner known per se, such as by pharmacokinetic analysis. Suitable techniques will be clear to the person skilled in the art, and may for example generally involve the steps of suitably administering to a warm-blooded animal (i.e. to a human or to another suitable mammal, such as a mouse, rabbit, rat, pig, dog or a primate, for example monkeys from the genus Macaca (such as, and in particular, cynomolgus monkeys (Macaca fascicularis) and/or rhesus monkeys (Macaca mulatta)) and baboon (Papio ursinus)) a suitable dose of the amino acid sequence, compound or polypeptide of the invention; collecting blood samples or other samples from said animal; determining the level or concentration of the amino acid sequence, compound or polypeptide of the invention in said blood sample; and calculating, from (a plot of) the data thus obtained, the time until the level or concentration of the amino acid sequence, compound or polypeptide of the invention has been reduced by 50% compared to the initial level upon dosing. Reference is for example made to the Experimental Part below, as well as to the standard handbooks, such as Kenneth, A et al: Chemical Stability of Pharmaceuticals: A Handbook for Pharmacists and Peters et al, Pharmacokinete analysis: A Practical Approach (1996). Reference is also made to “Pharmacokinetics”, M Gibaldi & D Perron, published by Marcel Dekker, 2nd Rev. edition (1982).
   [0329] As will also be clear to the skilled person (see for example pages 6 and 7 of WO 04/003019 and in the further references cited therein), the half-life can be expressed using parameters such as the t½-alpha, t½-beta and the area under the curve (AUC). In the present specification, an “increase in half-life” refers to an increase in any one of these parameters, such as any two of these parameters, or essentially all three these parameters. As used herein “increase in half-life” or “increased half-life” in particular refers to an increase in the t½-beta, either with or without an increase in the t½-alpha and/or the AUC or both.
[0330] p) In the context of the present invention, “modulating” or “to modulate” generally means either reducing or inhibiting the activity of, or alternatively increasing the activity of, a target or antigen, as measured using a suitable in vitro, cellular or in vivo assay. In particular, “modulating” or “to modulate” may mean either reducing or inhibiting the activity of, or alternatively increasing a (relevant or intended) biological activity of, a target or antigen, as measured using a suitable in vitro, cellular or in vivo assay (which will usually depend on the target or antigen involved), by at least 1%, preferably at least 5%, such as at least 10% or at least 25%, for example by at least 50%, at least 60%, at least 70%, at least 80%, or 90% or more, compared to activity of the target or antigen in the same assay under the same conditions but without the presence of the construct of the invention.
   [0331] As will be clear to the skilled person, “modulating” may also involve effecting a change (which may either be an increase or a decrease) in affinity, avidity, specificity and/or selectivity of a target or antigen for one or more of its ligands, binding partners, partners for association into a homomultimeric or heteromultimeric form, or substrates; and/or effecting a change (which may either be an increase or a decrease) in the sensitivity of the target or antigen for one or more conditions in the medium or surroundings in which the target or antigen is present (such as pH, ion strength, the presence of co-factors, etc.), compared to the same conditions but without the presence of the construct of the invention. As will be clear to the skilled person, this may again be determined in any suitable manner and/or using any suitable assay known per se, depending on the target or antigen involved.
   [0332] “Modulating” may also mean effecting a change (i.e. an activity as an agonist, as an antagonist or as a reverse agonist, respectively, depending on the target or antigen and the desired biological or physiological effect) with respect to one or more biological or physiological mechanisms, effects, responses, functions, pathways or activities in which the target or antigen (or in which its substrate(s), ligand(s) or pathway(s) are involved, such as its signalling pathway or metabolic pathway and their associated biological or physiological effects) is involved. Again, as will be clear to the skilled person, such an action as an agonist or an antagonist may be determined in any suitable manner and/or using any suitable (in vitro and usually cellular or in assay) assay known per se, depending on the target or antigen involved. In particular, an action as an agonist or antagonist may be such that an intended biological or physiological activity is increased or decreased, respectively, by at least 1%, preferably at least 5%, such as at least 10% or at least 25%, for example by at least 50%, at least 60%, at least 70%, at least 80%, or 90% or more, compared to the biological or physiological activity in the same assay under the same conditions but without the presence of the construct of the invention.
   [0333] Modulating may for example also involve allosteric modulation of the target or antigen; and/or reducing or inhibiting the binding of the target or antigen to one of its substrates or ligands and/or competing with a natural ligand, substrate for binding to the target or antigen. Modulating may also involve activating the target or antigen or the mechanism or pathway in which it is involved. Modulating may for example also involve effecting a change in respect of the folding or confirmation of the target or antigen, or in respect of the ability of the target or antigen to fold, to change its confirmation (for example, upon binding of a ligand), to associate with other (sub)units, or to disassociate. Modulating may for example also involve effecting a change in the ability of the target or antigen to transport other compounds or to serve as a channel for other compounds (such as ions).
   [0334] Modulating may be reversible or irreversible, but for pharmaceutical and pharmacological purposes will usually be in a reversible manner.
[0335] q) In respect of a target or antigen, the term “interaction site” on the target or antigen means a site, epitope, antigenic determinant, part, domain or stretch of amino acid residues on the target or antigen that is a site for binding to a ligand, receptor or other binding partner, a catalytic site, a cleavage site, a site for allosteric interaction, a site involved in multimerisation (such as homomerization or heterodimerization) of the target or antigen; or any other site, epitope, antigenic determinant, part, domain or stretch of amino acid residues on the target or antigen that is involved in a biological action or mechanism of the target or antigen. More generally, an “interaction site” can be any site, epitope, antigenic determinant, part, domain or stretch of amino acid residues on the target or antigen to which an amino acid sequence or polypeptide of the invention can bind such that the target or antigen (and/or any pathway, interaction, signalling, biological mechanism or biological effect in which the target or antigen is involved) is modulated (as defined herein).
[0336] r) An amino acid sequence or polypeptide is said to be “specific for” a first target or antigen compared to a second target or antigen when is binds to the first antigen with an affinity (as described above, and suitably expressed as a K_{D} value, K_{A} value, K_{off} rate and/or Kₒₙ rate) that is at least 10 times, such as at least 100 times, and preferably at least 1000 times, and up to 10.000 times or more better than the affinity with which said amino acid sequence or polypeptide binds to the second target or polypeptide. For example, the first antigen may bind to the target or antigen with a K_{D} value that is at least 10 times less, such as at least 100 times less, and preferably at least 1000 times less, such as 10.000 times less or even less than that, than the K_{D} with which said amino acid sequence or polypeptide binds to the second target or polypeptide. Preferably, when an amino acid sequence or polypeptide is “specific for” a first target or antigen compared to a second target or antigen, it is directed against (as defined herein) said first target or antigen, but not directed against said second target or antigen.
[0337] s) The terms “cross-block”, “cross-blocked” and “cross-blocking” are used interchangeably herein to mean the ability of an amino acid sequence or other binding agents (such as a polypeptide of the invention) to interfere with the binding of other amino acid sequences or binding agents of the invention to a given target. The extend to which an amino acid sequence or other binding agent of the invention is able to interfere with the binding of another to RANK-L, and therefore whether it can be said to cross-block according to the invention, can be determined using competition binding assays. One particularly suitable quantitative cross-blocking assay uses a Biacore machine which can measure the extent of interactions using surface plasmon resonance technology. Another suitable quantitative cross-blocking assay uses an ELISA-based approach to measure competition between amino acid sequences or other binding agents in terms of their binding to the target.
   [0338] The following generally describes a suitable Biacore assay for determining whether an amino acid sequence or other binding agent cross-blocks or is capable of cross-blocking according to the invention. It will be appreciated that the assay can be used with any of the amino acid sequence or other binding agents described herein. The Biacore machine (for example the Biacore 3000) is operated in line with the manufacturer's recommendations. Thus in one cross-blocking assay, the target protein is coupled to a CM5 Biacore chip using standard amine coupling chemistry to generate a surface that is coated with the target. Typically 200-800 resonance units of the target would be coupled to the chip (an amount that gives easily measurable levels of binding but that is readily saturable by the concentrations of test reagent being used). Two test amino acid sequences (termed A* and B*) to be assessed for their ability to cross-block each other are mixed at a one to one molar ratio of binding sites in a suitable buffer to create the test mixture. When calculating the concentrations on a binding site basis the molecular weight of an amino acid sequence is assumed to be the total molecular weight of the amino acid sequence divided by the number of target binding sites on that amino acid sequence. The concentration of each amino acid sequence in the test mix should be high enough to readily saturate the binding sites for that amino acid sequence on the target molecules captured on the Biacore chip. The amino acid sequences in the mixture are at the same molar concentration (on a binding basis) and that concentration would typically be between 1.00 and 1.5 micromolar (on a binding site basis). Separate solutions containing A* alone and B* alone are also prepared. A* and B* in these solutions should be in the same buffer and at the same concentration as in the test mix. The test mixture is passed over the target-coated Biacore chip and the total amount of binding recorded. The chip is then treated in such a way as to remove the bound amino acid sequences without damaging the chip-bound target. Typically this is done by treating the chip with 30 mM HCl for 60 seconds. The solution of A* alone is then passed over the target-coated surface and the amount of binding recorded. The chip is again treated to remove all of the bound amino acid sequences without damaging the chip-bound target. The solution of B* alone is then passed over the target-coated surface and the amount of binding recorded. The maximum theoretical binding of the mixture of A* and B* is next calculated, and is the sum of the binding of each amino acid sequence when passed over the target surface alone. If the actual recorded binding of the mixture is less than this theoretical maximum then the two amino acid sequences are cross-blocking each other. Thus, in general, a cross-blocking amino acid sequence or other binding agent according to the invention is one which will bind to the target in the above Biacore cross-blocking assay such that during the assay and in the presence of a second amino acid sequence or other binding agent of the invention the recorded binding is between 80% and 0.1% (e.g. 80% to 4%) of the maximum theoretical binding, specifically between 75% and 0.1% (e.g. 75% to 4%) of the maximum theoretical binding, and more specifically between 70% and 0.1% (e.g. 70% to 4%) of maximum theoretical binding (as just defined above) of the two amino acid sequences or binding agents in combination. The Biacore assay described above is a primary assay used to determine if amino acid sequences or other binding agents cross-block each other according to the invention. On rare occasions particular amino acid sequences or other binding agents may not bind to target coupled via amine chemistry to a CM5 Biacore chip (this usually occurs when the relevant binding site on target is masked or destroyed by the coupling to the chip). In such cases cross-blocking can be determined using a tagged version of the target, for example a N-terminal His-tagged version. In this particular format, an anti-His amino acid sequence would be coupled to the Biacore chip and then the His-tagged target would be passed over the surface of the chip and captured by the anti-His amino acid sequence. The cross blocking analysis would be carried out essentially as described above, except that after each chip regeneration cycle, new His-tagged target would be loaded back onto the anti-His amino acid sequence coated surface. In addition to the example given using N-terminal His-tagged target, C-terminal His-tagged target could alternatively be used. Furthermore, various other tags and tag binding protein combinations that are known in the art could be used for such a cross-blocking analysis (e.g. HA tag with anti-HA antibodies; FLAG tag with anti-FLAG antibodies; biotin tag with streptavidin).
   [0339] The following generally describes an ELISA assay for determining whether an amino acid sequence or other binding agent directed against a target cross-blocks or is capable of cross-blocking as defined herein. It will be appreciated that the assay can be used with any of the amino acid sequences (or other binding agents such as polypeptides of the invention) described herein. The general principal of the assay is to have an amino acid sequence or binding agent that is directed against the target coated onto the wells of an ELISA plate. An excess amount of a second, potentially cross-blocking, anti-target amino acid sequence is added in solution (i.e. not bound to the ELISA plate). A limited amount of the target is then added to the wells. The coated amino acid sequence and the amino acid sequence in solution compete for binding of the limited number of target molecules. The plate is washed to remove excess target that has not been bound by the coated amino acid sequence and to also remove the second, solution phase amino acid sequence as well as any complexes formed between the second, solution phase amino acid sequence and target. The amount of bound target is then measured using a reagent that is appropriate to detect the target. An amino acid sequence in solution that is able to cross-block the coated amino acid sequence will be able to cause a decrease in the number of target molecules that the coated amino acid sequence can bind relative to the number of target molecules that the coated amino acid sequence can bind in the absence of the second, solution phase, amino acid sequence. In the instance where the first amino acid sequence, e.g. an Ab-X, is chosen to be the immobilized amino acid sequence, it is coated onto the wells of the ELISA plate, after which the plates are blocked with a suitable blocking solution to minimize non-specific binding of reagents that are subsequently added. An excess amount of the second amino acid sequence, i.e. Ab-Y, is then added to the ELISA plate such that the moles of Ab-Y target binding sites per well are at least 10 fold higher than the moles of Ab-X target binding sites that were used, per well, during the coating of the ELISA plate. Target is then added such that the moles of target added per well are at least 25-fold lower than the moles of Ab-X target binding sites that were used for coating each well. Following a suitable incubation period the ELISA plate is washed and a reagent for detecting the target is added to measure the amount of target specifically bound by the coated anti-target amino acid sequence (in this case Ab-X). The background signal for the assay is defined as the signal obtained in wells with the coated amino acid sequence (in this case Ab-X), second solution phase amino acid sequence (in this case Ab-Y), target buffer only (i.e. without target added) and target detection reagents. The positive control signal for the assay is defined as the signal obtained in wells with the coated amino acid sequence (in this case Ab-X), second solution phase amino acid sequence buffer only (i.e. without second solution phase amino acid sequence added), target and target detection reagents. The ELISA assay may be run in such a manner so as to have the positive control signal be at least 6 times the background signal. To avoid any artefacts (e.g. significantly different affinities between Ab-X and Ab-Y for the target) resulting from the choice of which amino acid sequence to use as the coating amino acid sequence and which to use as the second (competitor) amino acid sequence, the cross-blocking assay may to be run in two formats: 1) format 1 is where Ab-X is the amino acid sequence that is coated onto the ELISA plate and Ab-Y is the competitor amino acid sequence that is in solution and 2) format 2 is where Ab-Y is the amino acid sequence that is coated onto the ELISA plate and Ab-X is the competitor amino acid sequence that is in solution. Ab-X and Ab-Y are defined as cross-blocking if, either in format 1 or in format 2, the solution phase anti-target amino acid sequence is able to cause a reduction of between 60% and 100%, specifically between 70% and 100%, and more specifically between 80% and 100%, of the target detection signal {i.e. the amount of target bound by the coated amino acid sequence) as compared to the target detection signal obtained in the absence of the solution phase anti-target amino acid sequence (i.e. the positive control wells).
[0340] t) An amino acid sequence is said to be “cross-reactive” for two different antigens or antigenic determinants if it is specific for (as defined herein) both these different antigens or antigenic determinants.
[0341] u) By binding that is “essentially independent of the pH” is generally meant herein that the association constant (K_{A}) of the amino acid sequence with respect to the serum protein (such as serum albumin) at the pH value(s) that occur in a cell of an animal or human body (as further described herein) is at least 5%, such as at least 10%, preferably at least 25%, more preferably at least 50%, even more preferably at least 60%, such as even more preferably at least 70%, such as at least 80% or 90% or more (or even more than 100%, such as more than 110%, more than 120% or even 130% or more, or even more than 150%, or even more than 200%) of the association constant (K_{A}) of the amino acid sequence with respect to the same serum protein at the pH value(s) that occur outside said cell. Alternatively, by binding that is “essentially independent of the pH” is generally meant herein that the k_{off} rate (measured by Biacore) of the amino acid sequence with respect to the serum protein (such as serum albumin) at the pH value(s) that occur in a cell of an animal or human body (as e.g. further described herein, e.g. pH around 5.5, e.g. 5.3 to 5.7) is at least 5%, such as at least 10%, preferably at least 25%, more preferably at least 50%, even more preferably at least 60%, such as even more preferably at least 70%, such as at least 80% or 90% or more (or even more than 100%, such as more than 110%, more than 120% or even 130% or more, or even more than 150%, or even more than 200%) of the k_{off} rate of the amino acid sequence with respect to the same serum protein at the pH value(s) that occur outside said cell, e.g. pH 7.2 to 7.4. By “the pH value(s) that occur in a cell of an animal or human body” is meant the pH value(s) that may occur inside a cell, and in particular inside a cell that is involved in the recycling of the serum protein. In particular, by “the pH value(s) that occur in a cell of an animal or human body” is meant the pH value(s) that may occur inside a (sub)cellular compartment or vesicle that is involved in recycling of the serum protein (e.g. as a result of pinocytosis, endocytosis, transcytosis, exocytosis and phagocytosis or a similar mechanism of uptake or internalization into said cell), such as an endosome, lysosome or pinosome.
[0342] v) As further described herein, the total number of amino acid residues in a Nanobody can be in the region of 110-120, is preferably 112-115, and is most preferably 113. It should however be noted that parts, fragments, analogs or derivatives (as further described herein) of a Nanobody are not particularly limited as to their length and/or size, as long as such parts, fragments, analogs or derivatives meet the further requirements outlined herein and are also preferably suitable for the purposes described herein;
[0343] w) The amino acid residues of a Nanobody are numbered according to the general numbering for V_{H} domains given by Kabat et al. (“Sequence of proteins of immunological interest”, US Public Health Services, NIH Bethesda, Md., Publication No. 91), as applied to V_{HH} domains from Camelids in the article of Riechmann and Muyldermans, J. Immunol. Methods 2000 Jun. 23; 240 (1-2): 185-195 (see for example FIG. 2 of this publication); or referred to herein. According to this numbering, FR1 of a Nanobody comprises the amino acid residues at positions 1-30, CDR1 of a Nanobody comprises the amino acid residues at positions 31-35, FR2 of a Nanobody comprises the amino acids at positions 36-49, CDR2 of a Nanobody comprises the amino acid residues at positions 50-65, FR3 of a Nanobody comprises the amino acid residues at positions 66-94, CDR3 of a Nanobody comprises the amino acid residues at positions 95-102, and FR4 of a Nanobody comprises the amino acid residues at positions 103-113. [In this respect, it should be noted that—as is well known in the art for V_{H} domains and for V_{HH} domains—the total number of amino acid residues in each of the CDR's may vary and may not correspond to the total number of amino acid residues indicated by the Kabat numbering (that is, one or more positions according to the Kabat numbering may not be occupied in the actual sequence, or the actual sequence may contain more amino acid residues than the number allowed for by the Kabat numbering). This means that, generally, the numbering according to Kabat may or may not correspond to the actual numbering of the amino acid residues in the actual sequence. Generally, however, it can be said that, according to the numbering of Kabat and irrespective of the number of amino acid residues in the CDR's, position 1 according to the Kabat numbering corresponds to the start of FR1 and vice versa, position 36 according to the Kabat numbering corresponds to the start of FR2 and vice versa, position 66 according to the Kabat numbering corresponds to the start of FR3 and vice versa, and position 103 according to the Kabat numbering corresponds to the start of FR4 and vice versa.].
   [0344] Alternative methods for numbering the amino acid residues of V_{H} domains, which methods can also be applied in an analogous manner to V_{HH} domains from Camelids and to Nanobodies, are the method described by Chothia et al. (Nature 342, 877-883 (1989)), the so-called “AbM definition” and the so-called “contact definition”. However, in the present description, claims and figures, the numbering according to Kabat as applied to V_{HH} domains by Riechmann and Muyldermans will be followed, unless indicated otherwise; and
[0345] x) The Figures, Sequence Listing and the Experimental Part/Examples are only given to further illustrate the invention and should not be interpreted or construed as limiting the scope of the invention and/or of the appended claims in any way, unless explicitly indicated otherwise herein.

[0346] For a general description of heavy chain antibodies and the variable domains thereof, reference is inter alia made to the prior art cited herein, to the review article by Muyldermans in Reviews in Molecular Biotechnology 74 (2001), 277-302; as well as to the following patent applications, which are mentioned as general background art: WO 94/04678, WO 95/04079 and WO 96/34103 of the Vrije Universiteit Brussel; WO 94/25591, WO 99/37681, WO 00/40968, WO 00/43507, WO 00/65057, WO 01/40310, WO 01/44301, EP 1134231 and WO 02/48193 of Unilever; WO 97/49805, WO 01/21817, WO 03/035694, WO 03/054016 and WO 03/055527 of the Vlaams Instituut voor Biotechnologie (VIB); WO 03/050531 of Algonomics N.V. and Ablynx N.V.; WO 01/90190 by the National Research Council of Canada; WO 03/025020 (=EP 1 433 793) by the Institute of Antibodies; as well as WO 04/041867, WO 04/041862, WO 04/041865, WO 04/041863, WO 04/062551, WO 05/044858, WO 06/40153, WO 06/079372, WO 06/122786, WO 06/122787 and WO 06/122825, by Ablynx N.V. and the further published patent applications by Ablynx N.V. Reference is also made to the further prior art mentioned in these applications, and in particular to the list of references mentioned on pages 41-43 of the International application WO 06/040153, which list and references are incorporated herein by reference.

[0347] In accordance with the terminology used in the art (see the above references), the variable domains present in naturally occurring heavy chain antibodies will also be referred to as “V_{HH} domains”, in order to distinguish them from the heavy chain variable domains that are present in conventional 4-chain antibodies (which will be referred to hereinbelow as “V_{H} domains”) and from the light chain variable domains that are present in conventional 4-chain antibodies (which will be referred to hereinbelow as “V_{I}, domains”).

[0348] As mentioned in the prior art referred to above, V_{HH} domains have a number of unique structural characteristics and functional properties which make isolated V_{HH} domains (as well as Nanobodies based thereon, which share these structural characteristics and functional properties with the naturally occurring V_{HH} domains) and proteins containing the same highly advantageous for use as functional antigen-binding domains or proteins. In particular, and without being limited thereto, V_{HH} domains (which have been “designed” by nature to functionally bind to an antigen without the presence of, and without any interaction with, a light chain variable domain) and Nanobodies can function as a single, relatively small, functional antigen-binding structural unit, domain or protein. This distinguishes the V_{HH} domains from the V_{H} and V_{L} domains of conventional 4-chain antibodies, which by themselves are generally not suited for practical application as single antigen-binding proteins or domains, but need to be combined in some form or another to provide a functional antigen-binding unit (as in for example conventional antibody fragments such as Fab fragments; in ScFv's fragments, which consist of a V_{H} domain covalently linked to a V_{L} domain).

[0349] Because of these unique properties, the use of V_{HH} domains and Nanobodies as single antigen-binding proteins or as antigen-binding domains (i.e. as part of a larger protein or polypeptide) offers a number of significant advantages over the use of conventional V_{H} and V_{L} domains, scFv's or conventional antibody fragments (such as Fab- or F(ab′)₂-fragments):
[0350] only a single domain is required to bind an antigen with high affinity and with high selectivity, so that there is no need to have two separate domains present, nor to assure that these two domains are present in the right spatial conformation and configuration (i.e. through the use of especially designed linkers, as with scFv's);
[0351] V_{HH} domains and Nanobodies can be expressed from a single gene and require no post-translational folding or modifications;
[0352] V_{HH} domains and Nanobodies can easily be engineered into multivalent and multispecific formats (as further discussed herein);
[0353] V_{HH} domains and Nanobodies are highly soluble and do not have a tendency to aggregate (as with the mouse-derived “dAb's” described by Ward et al., Nature, Vol. 341, 1989, p. 544);
[0354] V_{HH} domains and Nanobodies are highly stable to heat, pH, proteases and other denaturing agents or conditions (see for example Ewert et al, supra);
[0355] V_{HH} domains and Nanobodies are easy and relatively cheap to prepare, even on a scale required for production. For example, V_{HH} domains, Nanobodies and proteins/polypeptides containing the same can be produced using microbial fermentation (e.g. as further described below) and do not require the use of mammalian expression systems, as with for example conventional antibody fragments;
[0356] V_{HH} domains and Nanobodies are relatively small (approximately 15 kDa, or 10 times smaller than a conventional IgG) compared to conventional 4-chain antibodies and antigen-binding fragments thereof, and therefore show high(er) penetration into tissues (including but not limited to solid tumors and other dense tissues) than such conventional 4-chain antibodies and antigen-binding fragments thereof;
[0357] V_{HH} domains and Nanobodies can show so-called cavity-binding properties (inter alia due to their extended CDR3 loop, compared to conventional V_{H} domains) and can therefore also access targets and epitopes not accessible to conventional 4-chain antibodies and antigen-binding fragments thereof. For example, it has been shown that V_{HH} domains and Nanobodies can inhibit enzymes (see for example WO 97/49805; Transue et al., Proteins 1998 Sep. 1; 32(4): 515-22; Lauwereys et al., EMBO J. 1998 Jul. 1; 17(13): 3512-20).

[0358] In a specific and preferred aspect, the invention provides Nanobodies against RANK-L, and in particular Nanobodies against RANK-L from a warm-blooded animal, and more in particular Nanobodies against RANK-L from a mammal, and especially Nanobodies against human RANK-L; as well as proteins and/or polypeptides comprising at least one such Nanobody.

[0359] In particular, the invention provides Nanobodies against RANK-L, and proteins and/or polypeptides comprising the same, that have improved therapeutic and/or pharmacological properties and/or other advantageous properties (such as, for example, improved ease of preparation and/or reduced costs of goods), compared to conventional antibodies against RANK-L or fragments thereof, compared to constructs that could be based on such conventional antibodies or antibody fragments (such as Fab′ fragments, F(ab′)₂ fragments, ScFv constructs, “diabodies” and other multispecific constructs (see for example the review by Holliger and Hudson, Nat Biotechnol. 2005 September; 23(9):1126-36)), and also compared to the so-called “dAb's” or similar (single) domain antibodies that may be derived from variable domains of conventional antibodies. These improved and advantageous properties will become clear from the further description herein, and for example include, without limitation, one or more of:
[0360] increased affinity and/or avidity for RANK-L, either in a monovalent format, in a multivalent format (for example in a bivalent format) and/or in a multispecific format (for example one of the multispecific formats described hereinbelow);
[0361] better suitability for formatting in a multivalent format (for example in a bivalent format);
[0362] better suitability for formatting in a multispecific format (for example one of the multispecific formats described hereinbelow);
[0363] improved suitability or susceptibility for “humanizing” substitutions (as defined herein);
[0364] less immunogenicity, either in a monovalent format, in a multivalent format (for example in a bivalent format) and/or in a multispecific format (for example one of the multispecific formats described hereinbelow);
[0365] increased stability, either in a monovalent format, in a multivalent format (for example in a bivalent format) and/or in a multispecific format (for example one of the multispecific formats described hereinbelow);
[0366] increased specificity towards RANK-L, either in a monovalent format, in a multivalent format (for example in a bivalent format) and/or in a multispecific format (for example one of the multispecific formats described hereinbelow);
[0367] decreased or where desired increased cross-reactivity with RANK-L from different species;
   and/or
[0368] one or more other improved properties desirable for pharmaceutical use (including prophylactic use and/or therapeutic use) and/or for diagnostic use (including but not limited to use for imaging purposes), either in a monovalent format, in a multivalent format (for example in a bivalent format) and/or in a multispecific format (for example one of the multispecific formats described hereinbelow).

[0369] As generally described herein for the amino acid sequences of the invention, the Nanobodies of the invention are preferably in essentially isolated form (as defined herein), or form part of a protein or polypeptide of the invention (as defined herein), which may comprise or essentially consist of one or more Nanobodies of the invention and which may optionally further comprise one or more further amino acid sequences (all optionally linked via one or more suitable linkers). For example, and without limitation, the one or more amino acid sequences of the invention may be used as a binding unit in such a protein or polypeptide, which may optionally contain one or more further amino acid sequences that can serve as a binding unit (i.e. against one or more other targets than RANK-L), so as to provide a monovalent, multivalent or multispecific polypeptide of the invention, respectively, all as described herein. In particular, such a protein or polypeptide may comprise or essentially consist of one or more Nanobodies of the invention and optionally one or more (other) Nanobodies (i.e. directed against other targets than RANK-L), all optionally linked via one or more suitable linkers, so as to provide a monovalent, multivalent or multispecific Nanobody construct, respectively, as further described herein. Such proteins or polypeptides may also be in essentially isolated form (as defined herein).

[0370] In a Nanobody of the invention, the binding site for binding against RANK-L is preferably formed by the CDR sequences. Optionally, a Nanobody of the invention may also, and in addition to the at least one binding site for binding against RANK-L, contain one or more further binding sites for binding against other antigens, proteins or targets. For methods and positions for introducing such second binding sites, reference is for example made to Keck and Huston, Biophysical Journal, 71, October 1996, 2002-2011; EP 0 640 130 and WO 06/07260.

[0371] As generally described herein for the amino acid sequences of the invention, when a Nanobody of the invention (or a polypeptide of the invention comprising the same) is intended for administration to a subject (for example for therapeutic and/or diagnostic purposes as described herein), it is preferably directed against human RANK-L; whereas for veterinary purposes, it is preferably directed against RANK-L from the species to be treated. Also, as with the amino acid sequences of the invention, a Nanobody of the invention may or may not be cross-reactive (i.e. directed against RANK-L from two or more species of mammal, such as against human RANK-L and RANK-L from at least one of the species of mammal mentioned herein).

[0372] Also, again as generally described herein for the amino acid sequences of the invention, the Nanobodies of the invention may generally be directed against any antigenic determinant, epitope, part, domain, subunit or confirmation (where applicable) of RANK-L. However, it is generally assumed and preferred that the Nanobodies of the invention (and polypeptides comprising the same) are directed against the binding site for RANK on RANK-L or the binding site for OPG on RANK-L. In another aspect of the present invention, the amino acid sequences and polypeptides of the invention are preferably directed against an epitope on RANK-L that overlaps with the epitope of Denosumab.

[0373] As already described herein, the amino acid sequence and structure of a Nanobody can be considered—without however being limited thereto—to be comprised of four framework regions or “FR's” (or sometimes also referred to as “FW's”), which are referred to in the art and herein as “Framework region 1” or “FR1”; as “Framework region 2” or “FR2”; as “Framework region 3” or “FR3”; and as “Framework region 4” or “FR4”, respectively; which framework regions are interrupted by three complementary determining regions or “CDR's”, which are referred to in the art as “Complementarity Determining Region 1” or “CDR1”; as “Complementarity Determining Region 2” or “CDR2”; and as “Complementarity Determining Region 3” or “CDR3”, respectively. Some preferred framework sequences and CDR's (and combinations thereof) that are present in the Nanobodies of the invention are as described herein. Other suitable CDR sequences can be obtained by the methods described herein.

[0374] According to a non-limiting but preferred aspect of the invention, (the CDR sequences present in) the Nanobodies of the invention are such that:
[0375] the Nanobodies can bind to RANK-L with a dissociation constant (K_{D}) of 10⁻⁵ to 10⁻¹² moles/liter or less, and preferably 10⁻⁷ to 10⁻¹² moles/liter or less and more preferably 10⁻⁸ to 10⁻¹² moles/liter (i.e. with an association constant (K_{A}) of 10⁵ to 10¹² liter/moles or more, and preferably 10⁷ to 10¹² liter/moles or more and more preferably 10⁸ to 10¹² liter/moles);
   and/or such that:
[0376] the Nanobodies can bind to RANK-L with a kₒₙ-rate of between 10² M⁻¹s⁻¹ to about 10⁷ M⁻¹s⁻¹, preferably between 10³ M⁻¹s⁻¹ and 10⁷ M⁻¹s⁻¹, more preferably between 10⁴ M⁻¹s⁻¹ and 10⁷ M⁻¹s⁻¹, such as between 10⁵ M⁻¹s⁻¹ and 10⁷ M⁻¹s⁻¹;
   and/or such that they:
[0377] the Nanobodies can bind to RANK-L with a k_{off} rate between 1 s⁻¹ (t_{1/2}=0.69 s) and 10⁻⁶ s⁻¹ (providing a near irreversible complex with a t_{1/2} of multiple days), preferably between 10⁻² s⁻¹ and 10⁻⁶ s⁻¹, more preferably between 10⁻³ s⁻¹ and 10⁻⁶ s⁻¹, such as between 10⁻⁴ s⁻¹ and 10⁻⁶ s⁻¹.

[0378] Preferably, (the CDR sequences present in) the Nanobodies of the invention are such that: a monovalent Nanobody of the invention (or a polypeptide that contains only one Nanobody of the invention) is preferably such that it will bind to RANK-L with an affinity less than 500 nM, preferably less than 200 nM, more preferably less than 10 nM, such as less than 500 pM.

[0379] The affinity of the Nanobody of the invention against RANK-L can be determined in a manner known per se, for example using the general techniques for measuring K_{D}. K_{A}, k_{off} or kₒₙ mentioned herein, as well as some of the specific assays described herein.

[0380] Some preferred IC50 values for binding of the Nanobodies of the invention (and of polypeptides comprising the same) to RANK-L will become clear from the further description and examples herein.

[0381] In a preferred but non-limiting aspect, the invention relates to a Nanobody (as defined herein) against RANK-L, which consists of 4 framework regions (FR1 to FR4 respectively) and 3 complementarity determining regions (CDR1 to CDR3 respectively), in which:

[0382] CDR1 is chosen from the group consisting of:
[0383] a) the amino acid sequences of SEQ ID NO's: 188-249;
[0384] b) amino acid sequences that have at least 80% amino acid identity with at least one of the amino acid sequences of SEQ ID NO's: 188-249;
[0385] c) amino acid sequences that have 3, 2, or 1 amino acid difference with at least one of the amino acid sequences of SEQ ID NO's: 188-249;
   and/or

[0386] CDR2 is chosen from the group consisting of:
[0387] d) the amino acid sequences of SEQ ID NO's: 312-373 and 758;
[0388] e) amino acid sequences that have at least 80% amino acid identity with at least one of the amino acid sequences of SEQ ID NO's: 312-373 and 758;
[0389] f) amino acid sequences that have 3, 2, or 1 amino acid difference with at least one of the amino acid sequences of SEQ ID NO's: 312-373 and 758;
   and/or

[0390] CDR3 is chosen from the group consisting of:
[0391] g) the amino acid sequences of SEQ ID NO's: 436-497;
[0392] h) amino acid sequences that have at least 80% amino acid identity with at least one of the amino acid sequences of SEQ ID NO's: 436-497;
[0393] i) amino acid sequences that have 3, 2, or 1 amino acid difference with at least one of the amino acid sequences of SEQ ID NO's: 436-497;
   or any suitable fragment of such an amino acid sequence.

[0394] In particular, according to this preferred but non-limiting aspect, the invention relates to a Nanobody (as defined herein) against RANK-L, which consists of 4 framework regions (FR1 to FR4 respectively) and 3 complementarity determining regions (CDR1 to CDR3 respectively), in which:

[0395] CDR1 is chosen from the group consisting of:
[0396] a) the amino acid sequences of SEQ ID NO's: 188-249;
[0397] b) amino acid sequences that have at least 80% amino acid identity with at least one of the amino acid sequences of SEQ ID NO's: 188-249;
[0398] c) amino acid sequences that have 3, 2, or 1 amino acid difference with at least one of the amino acid sequences of SEQ ID NO's: 188-249;
   and

[0399] CDR2 is chosen from the group consisting of:
[0400] d) the amino acid sequences of SEQ ID NO's: 312-373 and 758;
[0401] e) amino acid sequences that have at least 80% amino acid identity with at least one of the amino acid sequences of SEQ ID NO's: 312-373 and 758;
[0402] f) amino acid sequences that have 3, 2, or 1 amino acid difference with at least one of the amino acid sequences of SEQ ID NO's: 312-373 and 758;
   and

[0403] CDR3 is chosen from the group consisting of:
[0404] g) the amino acid sequences of SEQ ID NO's: 436-497;
[0405] h) amino acid sequences that have at least 80% amino acid identity with at least one of the amino acid sequences of SEQ ID NO's: 436-497;
[0406] i) amino acid sequences that have 3, 2, or 1 amino acid difference with at least one of the amino acid sequences of SEQ ID NO's: 436-497;
   or any suitable fragment of such an amino acid sequences.

[0407] As generally mentioned herein for the amino acid sequences of the invention, when a Nanobody of the invention contains one or more CDR1 sequences according to b) and/or c):
[0408] i) any amino acid substitution in such a CDR according to b) and/or c) is preferably, and compared to the corresponding CDR according to a), a conservative amino acid substitution (as defined herein);
   and/or
[0409] ii) the CDR according to b) and/or c) preferably only contains amino acid substitutions, and no amino acid deletions or insertions, compared to the corresponding CDR according to a);
   and/or
[0410] iii) the CDR according to b) and/or c) may be a CDR that is derived from a CDR according to a) by means of affinity maturation using one or more techniques of affinity maturation known per se.

[0411] Similarly, when a Nanobody of the invention contains one or more CDR2 sequences according to e) and/or f):
[0412] i) any amino acid substitution in such a CDR according to e) and/or f) is preferably, and compared to the corresponding CDR according to d), a conservative amino acid substitution (as defined herein);
   and/or
[0413] ii) the CDR according to e) and/or f) preferably only contains amino acid substitutions, and no amino acid deletions or insertions, compared to the corresponding CDR according to d);
   and/or
[0414] iii) the CDR according to e) and/or f) may be a CDR that is derived from a CDR according to d) by means of affinity maturation using one or more techniques of affinity maturation known per se.

[0415] Also, similarly, when a Nanobody of the invention contains one or more CDR3 sequences according to h) and/or i):
[0416] i) any amino acid substitution in such a CDR according to h) and/or i) is preferably, and compared to the corresponding CDR according to g), a conservative amino acid substitution (as defined herein);
   and/or
[0417] ii) the CDR according to h) and/or i) preferably only contains amino acid substitutions, and no amino acid deletions or insertions, compared to the corresponding CDR according to g);
   and/or
[0418] iii) the CDR according to h) and/or i) may be a CDR that is derived from a CDR according to g) by means of affinity maturation using one or more techniques of affinity maturation known per se.

[0419] It should be understood that the last three paragraphs generally apply to any Nanobody of the invention that comprises one or more CDR1 sequences, CDR2 sequences and/or CDR3 sequences according to b), c), e), f), h) or i), respectively.

[0420] Of the Nanobodies of the invention, Nanobodies comprising one or more of the CDR's explicitly listed above are particularly preferred; Nanobodies comprising two or more of the CDR's explicitly listed above are more particularly preferred; and Nanobodies comprising three of the CDR's explicitly listed above are most particularly preferred.

[0421] Some particularly preferred, but non-limiting combinations of CDR sequences, as well as preferred combinations of CDR sequences and framework sequences, are mentioned in Table A-1 below, which lists the CDR sequences and framework sequences that are present in a number of preferred (but non-limiting) Nanobodies of the invention. As will be clear to the skilled person, a combination of CDR1, CDR2 and CDR3 sequences that occur in the same clone (i.e. CDR1, CDR2 and CDR3 sequences that are mentioned on the same line in Table A-1) will usually be preferred (although the invention in its broadest sense is not limited thereto, and also comprises other suitable combinations of the CDR sequences mentioned in Table A-1). Also, a combination of CDR sequences and framework sequences that occur in the same clone (i.e. CDR sequences and framework sequences that are mentioned on the same line in Table A-1) will usually be preferred (although the invention in its broadest sense is not limited thereto, and also comprises other suitable combinations of the CDR sequences and framework sequences mentioned in Table A-1, as well as combinations of such CDR sequences and other suitable framework sequences, e.g. as further described herein).

[0422] Also, in the Nanobodies of the invention that comprise the combinations of CDR's mentioned in Table A-1, each CDR can be replaced by a CDR chosen from the group consisting of amino acid sequences that have at least 80%, preferably at least 90%, more preferably at least 95%, even more preferably at least 99% sequence identity (as defined herein) with the mentioned CDR's; in which:
[0423] i) any amino acid substitution in such a CDR is preferably, and compared to the corresponding CDR sequence mentioned in Table A-1, a conservative amino acid substitution (as defined herein);
   and/or
[0424] ii) any such CDR sequence preferably only contains amino acid substitutions, and no amino acid deletions or insertions, compared to the corresponding CDR sequence mentioned in Table A-1;
   and/or
[0425] iii) any such CDR sequence is a CDR that is derived by means of a technique for affinity maturation known per se, and in particular starting from the corresponding CDR sequence mentioned in Table A-1.

[0426] However, as will be clear to the skilled person, the (combinations of) CDR sequences, as well as (the combinations of) CDR sequences and framework sequences mentioned in Table A-1 will generally be preferred.

TABLE A-1
Preferred combinations of CDR sequences, preferred combinations of framework sequences, and preferred
combinations of framework and CDR sequences.
(“ID” refers to the SEQ ID NO in the attached sequence listing)

| | | | | | | | | | | | | | | |
|---|---|---|---|---|---|---|---|---|---|---|---|---|---|---|
| Clone | ID | FR1 | ID | CDR 1 | ID | FR2 | ID | CDR 2 | ID | FR3 | ID | CDR 3 | ID | FR4 |

| | | | | | | | | | | | | | | |
|---|---|---|---|---|---|---|---|---|---|---|---|---|---|---|
| RANKL1 | 126 | EVQLVESGGGL | 188 | SSTMA | 250 | WFRQPPG | 312 | SISTSGTRTL | 374 | RFTISRDNAKSTGYLQ | 436 | VNRRGWE | 498 | WGLGAQVT |
| | | VQAGGSLRLSC | | | | GERDFVA | | YADSVKG | | MNSLKPEDTAVYFCAA | | FWRLASG | | VSS |
| | | AVSGRTFS | | | | | | | | | | YDY | | |
| RANKL2 | 127 | EVQLVESGGGL | 189 | SYYMS | 251 | WVRQAPG | 313 | SIYSDGSTTD | 375 | RFTISRDNAKNTLNLQ | 437 | DANSGGL | 499 | WGQGTQVT |
| | | VQPGGSLRLSC | | | | KGLEWVS | | YADSVKG | | MNSLKSEDTAVYYCAK | | EYDY | | VSS |
| | | AASGFTFS | | | | | | | | | | | | |
| RANKL3 | 128 | EVQLVESGGKL | 190 | IYNMA | 252 | WFRQGPG | 314 | RIYWSDDNT | 376 | RFTISRDNATNTVYLQ | 438 | KTTKWSLE | 500 | WGQGTQVT |
| | | VQAGGSLRLSC | | | | KGRESVG | | YYADSVKG | | MNSLKPEDTAVYYCAG | | YDY | | VSS |
| | | AVSGRTSS | | | | | | | | | | | | |
| RANKL4 | 129 | KVQLVESGGGL | 191 | SYAMG | 253 | WFRQAPG | 315 | VINYRGSSLK | 377 | RFTISRDNAKNMVYLQ | 439 | QTSGADF | 501 | WGQGTQVT |
| | | VQTGDSLRLSC | | | | KEREFVA | | YADRVKG | | MNSLKPDDTAVYYCAA | | GTTPQRY | | VSS |
| | | AASGRAIG | | | | | | | | | | TY | | |
| RANKL5 | 130 | EVQLVESGGGL | 192 | GHTMA | 254 | WFRQAPG | 316 | TITSSGSTIFY | 378 | RFTISRDNGKKTMTLE | 440 | RIRGKVTV | 502 | WGQGTQVT |
| | | VQAGGSLRLSC | | | | KERDFVA | | ADSVKG | | MDSLKPEDTAVYYCAA | | DNFDYAY | | VSS |
| | | AASGRTIG | | | | | | | | | | | | |
| RANKL6 | 131 | EVQLVESGGGL | 193 | YYTAS | 255 | WFRQAPG | 317 | AISPSGNTYY | 379 | RFTISRDNGKHTMYLQ | 441 | RATDSIYY | 503 | WGQGTQVT |
| | | MQTGGSLRLS | | | | KEREFVA | | ADSVKG | | MNSLNPEDTAVYFCAI | | ASSYRH | | VSS |
| | | CAASGVTYS | | | | | | | | | | | | |
| RANKL7 | 132 | EVQLVESEGGP | 194 | VSTIA | 256 | WFRQAPG | 318 | AIYPSGRNAY | 380 | RFTISRDNAKKTVYLQ | 442 | HQPSGSY | 504 | WGQGTQVT |
| | | VQSGGSLRLSC | | | | EGREFVA | | VADSVKG | | MNSLKPEDTAAYYCAA | | YSAEAYAY | | VSS |
| | | AASGRTFS | | | | | | | | | | | | |
| RANKL8 | 133 | EVQLVESGGG | 195 | RYAMG | 257 | WFRQAPG | 319 | AISVGGTYQ | 381 | RFTISRDNAESTVYLQ | 443 | DASPYGYL | 505 | WGQGTQVT |
| | | SVQPGGSLRLS | | | | KEREFVS | | YYVDSVKG | | MNSLKPEDTAVYYCAG | | REYTATRF | | VSS |
| | | CAASGGTFS | | | | | | | | | | DY | | |
| RANKL9 | 134 | EVQLVESGGGL | 196 | SYAMG | 258 | WFRQAPG | 320 | AINYSGGST | 382 | RFTISRDNAKNTLYLQ | 444 | GSGYASL | 506 | WGQGTQVT |
| | | VQAGGSLRLTC | | | | KEREFVA | | NYADSVKG | | MNSLEPEDTAVYYCAA | | SYYSTERA | | VSS |
| | | AASGRTFR | | | | | | | | | | YTY | | |
| RANKL10 | 135 | EVQLVESGGGL | 197 | SRTMG | 259 | WFRQAPG | 321 | AITPSSRTTY | 383 | RFTISRDNAKNTVLLQ | 445 | ERTYGSN | 507 | WGQGTQVT |
| | | VQAGGSLRLSC | | | | KEREFVA | | YADSVKG | | MNSLKPEDTAVYYCAA | | YTRPTAW | | VSS |
| | | AASGITFS | | | | | | | | | | NY | | |
| RANKL11 | 136 | EVQLVESGGGL | 198 | SKTMG | 260 | WFRQPPG | 322 | AITPTSRTTY | 384 | RFTISRDNAKNTVSLQ | 446 | VRRYGSP | 508 | WGQGTQVT |
| | | VQAGGSLRLSC | | | | NEREFVA | | YADSVKG | | MNSLKFEDTAAYYCVA | | PHDGSSY | | VSS |
| | | AASGRTFS | | | | | | | | | | EY | | |
| RANKL12 | 137 | EVQLVESGGG | 199 | MA | 261 | WFRQAPG | 323 | AITGSGRSTY | 385 | RFTISRDNAKNTAYLQ | 447 | LRGLGLEY | 509 | WGQGTQVT |
| | | WMQAGGSLRL | | | | KEREFVA | | YTDSVKG | | MKSLKPEDTAVYYCAG | | DSAKSYSY | | VSS |
| | | SCAASGRTFT | | | | | | | | | | | | |
| RANKL13 | 138 | EVQLVESGGGL | 200 | SYPMG | 262 | WFRQAPG | 324 | SITGSGGSTY | 386 | RFTISRDNAKNTVYLQ | 448 | YIRPDTYL | 510 | WGQGTQVT |
| | | VQAGGSLRLSC | | | | KEREFVA | | YADSVKG | | MNSLRPEDTAVYSCAA | | SRDYRKY | | VSS |
| | | AASGRTFR | | | | | | | | | | DY | | |
| RANKL14 | 139 | EVQLVESGGGL | 201 | YYTMS | 263 | WFRQDPG | 325 | AVPLSGNTY | 387 | RFTISRDNAKNTADLQ | 449 | RASGSIYN | 511 | WGQGTQVT |
| | | VQAGGSLRLSC | | | | KEREFVA | | YADPVRG | | MNSLKPEDTAVYYCAA | | RGSYAY | | VSS |
| | | AASGRTSS | | | | | | | | | | | | |
| RANKL15 | 140 | EVQLVESGGGL | 202 | NYVMG | 264 | WFRQAPG | 326 | AISTGGSWT | 388 | RFTISRDNTKNTVYLQ | 450 | TTPATTYL | 512 | WGQGTQVT |
| | | VQAGGSLRLSC | | | | KEREFVT | | GYVDSVKD | | MASLKPEDTAVYYCAA | | PRSERQY | | VSS |
| | | AAAGGTFR | | | | | | | | | | DY | | |
| RANKL16 | 141 | EVQLVESGGGL | 203 | SYAMG | 265 | WFRQVPG | 327 | AISTGSITIYG | 389 | RFTISRDNAKNTVYLQ | 451 | GKREPYL | 513 | WGQGTQVT |
| | | VQAGGSLRLSC | | | | KERDFVA | | DSVKG | | MNSLKPEDTAVYYCAA | | RQYTASN | | VSS |
| | | VASRRTFS | | | | | | | | | | PYDY | | |
| RANKL17 | 142 | EVQLVESGGGL | 204 | STYVMG | 266 | WFRQAPG | 328 | AVSWSSGNA | 390 | RFATSRDTAKNIMYLQ | 452 | GRGYGLL | 514 | WGQGTQVT |
| | | VQVGDSLRLSC | | | | KEREFVA | | YYDSAKG | | MNSLKPEDTAVYTCAA | | SEYTQAP | | VSS |
| | | EASGRSRF | | | | | | | | | | RYDY | | |
| RANKL18 | 143 | EVQLVESGGGL | 205 | RSAMG | 267 | WFRQAPG | 329 | FITGSGGTTY | 391 | RFTISRDNAQNPVYLQ | 453 | YRRTYISS | 515 | WGQGTQVT |
| | | VQAGGSLRLSC | | | | KEREFVG | | YGESVKG | | MNSLKPEDTAVYYCGV | | TYSESSEY | | VSS |
| | | AASGRTFS | | | | | | | | | | DY | | |
| RANKL19 | 144 | EVQLVESGGGL | 206 | MG | 268 | WFRQAPG | 330 | SITGSGSVTN | 392 | RFTISRDNAKNTVFLQ | 454 | YLPSPYYS | 516 | WGQGTQVT |
| | | VQAGDSLRLSC | | | | KEREFVA | | YADSVKG | | MNSLKPEDTAVYYCAA | | SYYDSTKY | | VSS |
| | | AASGRTVT | | | | | | | | | | EY | | |
| RANKL20 | 145 | EVQLVESGGGL | 207 | MG | 269 | WFRQAPG | 331 | AISGSGKITN | 393 | RFTISRDHAKNTVFLQ | 455 | YLRSPYYS | 517 | WGQGTQVT |
| | | VQAGDSLRLSC | | | | TEREFVA | | YADSVKG | | MDSLKPEDTAVYYCAG | | SFYDSAKY | | VSS |
| | | AASGRTFT | | | | | | | | | | EY | | |
| RANKL21 | 146 | EVQLVESGGGL | 208 | SYAVG | 270 | WFRQVPG | 332 | AISTGSVTIY | 394 | RFTISRDNAKNTVYLQ | 456 | GNREPYL | 518 | WGQGTQVT |
| | | VQAGGSLRLSC | | | | EERDFVA | | ADSVKG | | MNSLKPEDTAVYYCAA | | RQYTASN | | VSS |
| | | VASRRTFN | | | | | | | | | | PYDY | | |
| RANKL22 | 147 | EVQLVESGGGL | 209 | NYGMG | 271 | WFRQAPG | 333 | AITSAGGTTY | 395 | RFTISRDSAKYTVYLQ | 457 | KLQIGGR | 519 | RGQGTQVT |
| | | MQTGGSLRLS | | | | KEREFVA | | YGDFVKG | | MNSLKPEDTAVYWCA | | WHNLNDY | | VSS |
| | | CAASERTSR | | | | | | | | A | | GY | | |
| RANKL23 | 148 | EVQLVESGGGL | 210 | VYTMA | 272 | WFRQAPG | 334 | AITRSGKTTY | 396 | RFTISRDNAKNTVNLQ | 458 | KALLGMTN | 520 | WGQETQVT |
| | | VQAGGSLRLSC | | | | KEREFVA | | YADSVKG | | MNSLKPDDTAVYYCAA | | PAGYEY | | VSS |
| | | AASGLTT | | | | | | | | | | | | |
| RANKL | 149 | EVQLVEAGGGL | 211 | GTMA | 273 | WFRQAPG | 335 | TVTSSGSTTF | 397 | RFTISRDNAENTVNLQ | 459 | RIRGKVTP | 521 | WGQGTQVT |
| 3D4 | | VQAGDSLRLSC | | | | KDREFVA | | YADSVKG | | MDSLKPEDTAVYYCAA | | SNYDYAY | | VSS |
| | | AASGRTIR | | | | | | | | | | | | |
| RANKL | 150 | evqlvesgggw | 212 | MA | 274 | wfrqasg | 336 | AITGSGRSTY | 398 | rftisrdnakntaylq | 460 | LRGLGLEY | 522 | wgqgtqvt |
| PMP4B3 | | mqaggslrlsc | | | | kerefva | | YTDSVKG | | mkslkpedtavyycag | | DSAKSYSY | | vss |
| | | aasgrtft | | | | | | | | | | | | |
| RANKL | 151 | EVQLVESGGGL | 213 | SYPMG | 275 | WFRQAPG | 337 | SITGSGGSTY | 399 | RFTISRDNAKNTVYLQ | 461 | YIRPDTYL | 523 | WGQGTQVT |
| PMP2E11 | | VQAGGSLRLSC | | | | KEREFVA | | YADSVKG | | MNSLRPEDTAVYSCAA | | SRDYRKY | | VSS |
| | | AASGRTFR | | | | | | | | | | DY | | |
| RANKL | 152 | evqlvesgggl | 214 | RYTMS | 276 | wfrqdpg | 338 | AVPLSGNTY | 400 | rftisrdnakntvdlq | 462 | RASGSIFN | 524 | wgqgtqvt |
| PMP2A6 | | vqaggslrlsc | | | | kerefva | | YADPVRG | | mnslkpedtavyycaa | | RGSYAY | | vss |
| | | aasglt | | | | | | | | | | | | |
| RANKL | 153 | evqlvesgggl | 215 | RYTMS | 277 | wfrqdpg | 339 | AVPLSGNTY | 401 | rftisrdnakntvdlq | 463 | RASGSIFN | 525 | wgqgtqvt |
| PMP1F2 | | vpaggslrlsc | | | | kerefva | | YADPVRG | | mnslkpedtavyycaa | | RGSYAY | | vss |
| | | aasgltdr | | | | | | | | | | | | |
| RANKL | 154 | evqlvesgggl | 216 | RYTMS | 278 | wfrqdpg | 340 | AVPLSGNTY | 402 | rftisrdnakntvdlq | 464 | RASGSIFN | 526 | wgqgtqvt |
| PMP2D4 | | vpaggslrlsc | | | | kerefva | | YADPVRG | | mnslkpedtavyycaa | | RGSYAY | | vss |
| | | aasgltdr | | | | | | | | | | | | |
| RANKL | 155 | evqlvesgggl | 217 | NYVMG | 279 | wfrqapg | 341 | AISTGGSWT | 403 | rftisrdntkntvylq | 465 | TMPATTYL | 527 | wgqgtqvt |
| PMP7B2 | | vqaggslrlsc | | | | kerefvt | | GYVDSVKD | | maslkpedtavyycaa | | PRSERQY | | vss |
| | | aaaggtfr | | | | | | | | | | DY | | |
| RANKL | 156 | evqlvesgggl | 218 | RYVMG | 280 | wfrqapg | 342 | AISTGGTWT | 404 | rftisrdntkntvylq | 466 | TTPTTSYL | 528 | wgqgtgvt |
| PMP7A11 | | vqaggsltlsc | | | | kerefva | | GYVDSVKD | | maslkpedtavyncaa | | PRSERQY | vss | |
| | | aaagftfr | | | | | | | | | | EY | | |
| RANKL | 157 | evqlvesgggl | 219 | NYVMG | 281 | wfrqapg | 343 | AISTGGTWT | 405 | rftisrdntkntvnlq | 467 | TTPTTSYL | 529 | wgqgtgvt |
| PMP7F1 | | vqaggslrlsc | | | | kerefvt | | GYVDSVKD | | maslkpedtavyycaa | | PRSERQY | | vss |
| | | aaagctfr | | | | | | | | | | EY | | |
| RANKL | 158 | evqlvesgggl | 220 | NYVMG | 282 | wfrqapg | 344 | AISTGGSWT | 406 | rftisrdntkntvylq | 468 | TTPATTYL | 530 | wgqgtgvt |
| PMP7H5 | | vqaggslrlsc | | | | kerefva | | GYVDSVKD | | mvslkpedtavyycaa | | PRSERQY | | vss |
| | | aaaggtfr | | | | | | | | | | DY | | |
| RANKL | 159 | evqlvesgggl | 221 | NYVMG | 283 | wfrqapg | 345 | AISAGGSWT | 407 | rftisrdntkntvylq | 469 | TTPATTYL | 531 | wgqgtgvtv |
| PMP7E7 | | vqaggslrlsc | | | | kerefvt | | GYVDSVKD | | maslkpedtavyycaa | | PRSERQY | | vss |
| | | aaaggtfr | | | | | | | | | | DY | | |
| RANKL | 160 | evqlvesgggl | 222 | AYVMG | 284 | wfrqapg | 346 | GISTGGTWT | 408 | rftisrdntkntvylq | 470 | TTPVTSYL | 532 | wgqgtgvt |
| PMP7E2 | | vqaggslrlsc | | | | kerefva | | GYVDSVKD | | maslkpedtavyycaa | | PRSERQY | | vss |
| | | aaagytfr | | | | | | | | | | EH | | |
| RANKL | 161 | evqlvesgggl | 223 | ARAYVM | 285 | wfrqapg | 347 | AISTGGTWT | 409 | rftisrdntkntmylq | 471 | TTPSTSYL | 533 | wgqgtgvt |
| PMP3H10 | | vqsggslrlsc | | G | | kerefva | | GYVDSVKD | | maslkpedtavyycaa | | PRSERQY | | vss |
| | | aaagytfr | | | | | | | | | | EY | | |
| RANKL | 162 | evqlvesgggl | 224 | SYAMG | 286 | wfrqvpg | 348 | AISTGSITIYG | 410 | rftisrdnakntvylq | 472 | GKREPYL | 534 | wgqgtgvt |
| PMP7F9 | | vqaggslrlsc | | | | kerdfva | | DSVKG | | mnslkpedtavyycaa | | RQYTASN | | vss |
| | | vasrrtfs | | | | | | | | | | PYDY | | |
| RANKL | 163 | evqlvesgggl | 225 | SYAMG | 287 | wfrqvpg | 349 | AITTGSITIYA | 411 | rfaisrdnakntvylq | 473 | GNREPYL | 535 | wgqgtgvt |
| PMP7E6 | | vqaggslrlsc | | | | kerdfva | | DSVKG | | mnslkpedtavyycaa | | RQYTASN | | vss |
| | | vaskrtfa | | | | | | | | | | PYDY | | |
| RANKL | 164 | evqlvesgggl | 226 | STYVMG | 288 | wfrqapg | 350 | AVSWSSGNA | 412 | rfatsrdtaknimylq | 474 | GRGYGLL | 536 | wgqgtgvt |
| PMP4F4 | | vqvgdslrlsc | | | | kerefva | | YYIDSAKG | | mnslkpedtavytcaa | | SEYTQAP | | vss |
| | | easgrsrf | | | | | | | | | | RYDY | | |
| RANKL | 165 | evqlvesgggl | 227 | STYVMG | 289 | wfrqapg | 351 | AISWSSGNA | 413 | rfatsrdtaknimylq | 475 | GRGYGLL | 537 | wgqgtgvt |
| PMP7B11 | | vqvgdslrlsc | | | | kerefva | | YYIDSAKG | | mnslkpedtavyscaa | | SEYTQAA | | vss |
| | | easgrsrf | | | | | | | | | | RYDY | | |
| RANKL | 166 | evqlvesgggl | 228 | RSAMG | 290 | wfrqapg | 352 | FITGSGGTTY | 414 | rftisrdnaqnpvylq | 476 | YRRTYISS | 538 | wgqgtgvt |
| PMP9H9 | | vqaggslrlsc | | | | kerefvg | | YGESVKG | | mnslkpedtavyycgv | | TYSESSEY | | vss |
| | | aasgrtfs | | | | | | | | | | DY | | |
| RANKL | 167 | evqlvesgggl | 229 | RSAMG | 291 | wfrqapg | 353 | FITGSGGTTY | 415 | rftisrdnaqnpvylq | 477 | YRRTYISS | 539 | wgqgtgvt |
| PMP9G3 | | vqaggslrlsc | | | | kerefvg | | YGESVKG | | mnslkpedtavyycav | | TYNESSEY | | vss |
| | | aasgrtfs | | | | | | | | | | DY | | |
| RANKL | 168 | evqlvesgggl | 230 | RSAMG | 292 | wfrqapg | 354 | FITGSGGTTY | 416 | rftisrdnaqnpvylq | 478 | YRRTYISS | 540 | wgqgtgvt |
| PMP9E3 | | vqaggslrlsc | | | | kerefvg | | YGESVKG | | mnslkpedtavyycgv | | TYSESSEY | | vss |
| | | aasgrtfs | | | | | | | | | | DY | | |
| RANKL | 169 | evqlvesgggl | 231 | RSAMG | 293 | wfrqapg | 355 | FITGSGGTTY | 417 | rftisrdnaqnpvylq | 479 | YRRTYISIT | 541 | wgqgtgvt |
| PMP7H9 | | vqaggslrlsc | | | | kerefvg | | YGESVKG | | mnslkpedtavyycgv | | YSESSDY | | vss |
| | | aasgrtfs | | | | | | | | | | DY | | |
| RANKL | 170 | evqlvesgggl | 232 | ISAMG | 294 | wfrqapg | 356 | FITGSGGTTY | 418 | rftisrdnaqnpvylq | 480 | YRRTYISS | 542 | wgqgtgvt |
| PMP4C3 | | vqaggslrlsc | | | | kerefvc | | YGESVKG | | mnslkpedtavyycgv | | TYSESSEY | | vss |
| | | aasgrtfs | | | | | | | | | | DY | | |
| RANKL | 171 | evqlvesgggl | 233 | RSAMG | 295 | wfrqapg | 357 | FITGSGGTTY | 419 | rftisrdnaqnpvylq | 481 | YRRTYISS | 543 | wgqgtgvt |
| PMP9G6 | | vqaggslrlsc | | | | kerefvg | | YGESVKG | | mnslkpedtavyycgv | | TYSESSEY | | vss |
| | | aasgrtfs | | | | | | | | | | DY | | |
| RANKL | 172 | evqlvesgggl | 234 | RSAMG | 296 | wfrqapg | 358 | FITGSGGTTY | 420 | rftisrdnaqnpvylq | 482 | YRRTYISS | 544 | wgqgtgvt |
| PMP7B12 | | vqaggslrlsc | | | | kerefvg | | YGESVKG | | mnslkpedtavyycgv | | TYSESSEY | | vss |
| | | aasgrtfs | | | | | | | | | | DY | | |
| RANKL | 173 | evqlvesgggl | 235 | RSAMG | 297 | wfrqapg | 359 | FITGSGGTTY | 421 | rftisrdnaqnpvylq | 483 | YRRTYISS | 545 | wgqgtgvt |
| PMP7G3 | | vqaggslrlsc | | | | kerefvg | | YGESVKG | | mnslkpedtavyycav | | TYNESSEY | | vss |
| | | aasgrtfs | | | | | | | | | | DY | | |
| RANKL | 174 | evqlvesgggl | 236 | RSAMG | 298 | wfrqapg | 360 | FITGSGGTTY | 422 | rftisrdnaqnpvylq | 484 | YRRTYISS | 546 | wgqgtgvt |
| PMP9C12 | | vqaggslrlsc | | | | kerefvg | | YGESVKG | | mnslkpedtavyycgv | | TYSESSEY | | vss |
| | | aasgrtfs | | | | | | | | | | DY | | |
| RANKL | 175 | evqlvesgggl | 237 | MG | 299 | wfrqapg | 361 | AISGSGSITN | 423 | rftisrdyakttvflq | 485 | YVRTPYYS | 547 | wgqgtgvt |
| PMP1D8 | | vqagdslrlsc | | | | kerefva | | YADSVKG | | mnslkpedtavyycaa | | SYYDSTKY | | vss |
| | | aasgrift | | | | | | | | | | EY | | |
| RANKL | 176 | evqlvesgggl | 238 | MG | 300 | wfrqapg | 362 | FISGSGSVTN | 424 | rftisrdhakntvflq | 486 | YLRGPYYS | S48 | wgqgtgvt |
| PMP1A2 | | vqagdslrlsc | | | | kerefva | | YTDSVKG | | mnslkpedtavyycaa | | SFYDSTKY | | vss |
| | | aasgrtft | | | | | | | | | | EY | | |
| RANKL | 177 | evqlvesgggl | 239 | MG | 301 | wfrrapg | 363 | SISGSGKITN | 425 | rftisrdhaknavflq | 487 | YLRSPYYS | 549 | wgqgtgvt |
| PMP1E5 | | vqagdslrlsc | | | | terefva | | YADSVKG | | mdglkpedtavyycaa | | SYYDSAKY | | vss |
| | | aasgrtft | | | | | | | | | | EY | | |
| RANKL | 178 | evqlvesgggs | 240 | MG | 302 | wfrqapg | 364 | AISGSGKITN | 426 | rftisrdhamntvflq | 488 | YLRSPYYS | 550 | wgqgtgvt |
| PMP2B8 | | vqagdslrlsc | | | | terefva | | YADSVKG | | mdslkpedtavyycaa | | SYYDSAKY | | vss |
| | | aasgrtft | | | | | | | | | | EY | | |
| RANKL | 179 | evqlvesgggl | 241 | MG | 303 | wfrqapg | 365 | AISGSGKITN | 427 | rftisrdhakntvflq | 489 | YLRSPYYS | 551 | wgqgtgvt |
| PMP2C5 | | vqagdslrlsc | | | | terefva | | YADSVKG | | mdslkpedtavyycaa | | SYYDSAKY | | vss |
| | | aasgrtft | | | | | | | | | | EY | | |
| RANKL | 180 | evqlvesgggl | 242 | MG | 304 | wfrqapg | 366 | AISGSGKITN | 428 | rftisrdhakntvflq | 490 | YLRSPYYS | 552 | wgqgtqvt |
| PMP2B4 | | vqagdslrlsc | | | | terefva | | YADSVKG | | mdslkpedtavyycaa | | SYYDSAKY | | vss |
| | | aasgrtft | | | | | | | | | | EY | | |
| RANKL | 181 | evqlvesgggl | 243 | MG | 305 | wfrqapg | 367 | AISGSGKITN | 429 | rftisrdhakntvflq | 491 | YLRSPYYS | 553 | wgqgtqvt |
| PMP2A5 | | vqagdslrlsc | | | | terefva | | YADSVKG | | mdslkpedtavyycaa | | SYYDSAKY | | vss |
| | | aasgrtft | | | | | | | | | | EY | | |
| RANKL | 182 | evqlvesgggl | 244 | MG | 306 | wfrqapg | 368 | AISGSGKITN | 430 | rftisrdhakntvflq | 492 | YLRSPYYS | 554 | wgqgtqvt |
| PMP2D7 | | vqagdslrlsc | | | | terefva | | YADSVKG | | mdslkpedtavyycaa | | SYYDSAKY | | vss |
| | | aasgrtft | | | | | | | | | | EY | | |
| RANKL | 183 | evqlvesgggl | 245 | MG | 307 | wfrqapg | 369 | AISGSGKITN | 431 | rftisrdhakntvflq | 493 | YLRSPYYS | 555 | wgqgtqvt |
| PMP2G4 | | vqagdslrlsc | | | | terefva | | YADSVKG | | mdslkpedtavyycaa | | SYYDSAKY | | vss |
| | | aasgrtft | | | | | | | | | | EY | | |
| RANKL | 184 | emqlvesgggl | 246 | SYAMG | 308 | wfrqvpg | 370 | AISTHSITVYA | 432 | rftisrdnakntvylq | 494 | GNREPYL | 556 | wgqgtqvt |
| PMP7A8 | | vqaggslrlsc | | | | kerdfva | | DSVKG | | mntlkpedtavyycaa | | RQYTASN | | vss |
| | | vaskrtfa | | | | | | | | | | PYDY | | |
| RANKL | 185 | evqlvesgggl | 247 | SYAVG | 309 | wfrqvpg | 371 | AISTGSVTIY | 433 | rftisrdntkntvylq | 495 | GNREPYL | 557 | wgqgtqvt |
| PMP7A5 | | vqtggslrlsc | | | | kerdfva | | ADSVKG | | mnslkpedtavyycaa | | RQYTASN | | vss |
| | | vasrrtfs | | | | | | | | | | PYDY | | |
| RANKL | 186 | EVQLVESGGGL | 248 | NYVMG | 310 | WFRQAPG | 372 | AISTGGSWT | 434 | RFTISRDNTKNTVYLH | 496 | TTPVTTYL | 558 | WGQGTQVT |
| PMP7F8 | | VQAGGSLRLSC | | | | KEREFVT | | GYVDSVKD | | MASLKPEDTAVYYCAA | | PRSERQY | | VSS |
| | | AAAGGTFR | | | | | | | | | | DY | | |
| RANKL | 187 | EVQLVESGGGL | 249 | RYVMG | 311 | WFRQAPG | 373 | AISTGGTWT | 435 | RFTISRDNTKNTVYLQ | 497 | TTPTTSYL | 559 | WGQGTQVT |
| PMP7F6 | | VQAGDSLRLSC | | | | KEREFVA | | GYVDSVKD | | MASLKPEDTAVYNCAA | | PRSERQY | | VSS |
| | | AAAGFTFR | | | | | | | | | | EY | | |

[0427] Thus, in the Nanobodies of the invention, at least one of the CDR1, CDR2 and CDR3 sequences present is suitably chosen from the group consisting of the CDR1, CDR2 and CDR3 sequences, respectively, listed in Table A-1; or from the group of CDR1, CDR2 and CDR3 sequences, respectively, that have at least 80%, preferably at least 90%, more preferably at least 95%, even more preferably at least 99% “sequence identity” (as defined herein) with at least one of the CDR1, CDR2 and CDR3 sequences, respectively, listed in Table A-1; and/or from the group consisting of the CDR1, CDR2 and CDR3 sequences, respectively, that have 3, 2 or only 1 “amino acid difference(s)” (as defined herein) with at least one of the CDR1, CDR2 and CDR3 sequences, respectively, listed in Table A-1.

[0428] In this context, by “suitably chosen” is meant that, as applicable, a CDR1 sequence is chosen from suitable CDR1 sequences (i.e. as defined herein), a CDR2 sequence is chosen from suitable CDR2 sequences (i.e. as defined herein), and a CDR3 sequence is chosen from suitable CDR3 sequence (i.e. as defined herein), respectively. More in particular, the CDR sequences are preferably chosen such that the Nanobodies of the invention bind to RANK-L with an affinity (suitably measured and/or expressed as a K_{D}-value (actual or apparent), a K_{A}-value (actual or apparent), a kₒₙ-rate and/or a k_{off}-rate, or alternatively as an IC₅₀ value, as further described herein) that is as defined herein.

[0429] In particular, in the Nanobodies of the invention, at least the CDR3 sequence present is suitably chosen from the group consisting of the CDR3 sequences listed in Table A-1 or from the group of CDR3 sequences that have at least 80%, preferably at least 90%, more preferably at least 95%, even more preferably at least 99% sequence identity with at least one of the CDR3 sequences listed in Table A-1; and/or from the group consisting of the CDR3 sequences that have 3, 2 or only 1 amino acid difference(s) with at least one of the CDR3 sequences listed in Table A-1.

[0430] Preferably, in the Nanobodies of the invention, at least two of the CDR1, CDR2 and CDR3 sequences present are suitably chosen from the group consisting of the CDR1, CDR2 and CDR3 sequences, respectively, listed in Table A-1 or from the group consisting of CDR1, CDR2 and CDR3 sequences, respectively, that have at least 80%, preferably at least 90%, more preferably at least 95%, even more preferably at least 99% sequence identity with at least one of the CDR1, CDR2 and CDR3 sequences, respectively, listed in Table A-1; and/or from the group consisting of the CDR1, CDR2 and CDR3 sequences, respectively, that have 3, 2 or only 1 “amino acid difference(s)” with at least one of the CDR1, CDR2 and CDR3 sequences, respectively, listed in Table A-1.

[0431] In particular, in the Nanobodies of the invention, at least the CDR3 sequence present is suitably chosen from the group consisting of the CDR3 sequences listed in Table A-1 or from the group of CDR3 sequences that have at least 80%, preferably at least 90%, more preferably at least 95%, even more preferably at least 99% sequence identity with at least one of the CDR3 sequences listed in Table A-1, respectively; and at least one of the CDR1 and CDR2 sequences present is suitably chosen from the group consisting of the CDR1 and CDR2 sequences, respectively, listed in Table A-1 or from the group of CDR1 and CDR2 sequences, respectively, that have at least 80%, preferably at least 90%, more preferably at least 95%, even more preferably at least 99% sequence identity with at least one of the CDR1 and CDR2 sequences, respectively, listed in Table A-1; and/or from the group consisting of the CDR1 and CDR2 sequences, respectively, that have 3, 2 or only 1 amino acid difference(s) with at least one of the CDR1 and CDR2 sequences, respectively, listed in Table A-1.

[0432] Most preferably, in the Nanobodies of the invention, all three CDR1, CDR2 and CDR3 sequences present are suitably chosen from the group consisting of the CDR1, CDR2 and CDR3 sequences, respectively, listed in Table A-1 or from the group of CDR1, CDR2 and CDR3 sequences, respectively, that have at least 80%, preferably at least 90%, more preferably at least 95%, even more preferably at least 99% sequence identity with at least one of the CDR1, CDR2 and CDR3 sequences, respectively, listed in Table A-1; and/or from the group consisting of the CDR1, CDR2 and CDR3 sequences, respectively, that have 3, 2 or only 1 amino acid difference(s) with at least one of the CDR1, CDR2 and CDR3 sequences, respectively, listed in Table A-1.

[0433] Even more preferably, in the Nanobodies of the invention, at least one of the CDR1, CDR2 and CDR3 sequences present is suitably chosen from the group consisting of the CDR1, CDR2 and CDR3 sequences, respectively, listed in Table A-1. Preferably, in this aspect, at least one or preferably both of the other two CDR sequences present are suitably chosen from CDR sequences that have at least 80%, preferably at least 90%, more preferably at least 95%, even more preferably at least 99% sequence identity with at least one of the corresponding CDR sequences, respectively, listed in Table A-1; and/or from the group consisting of the CDR sequences that have 3, 2 or only 1 amino acid difference(s) with at least one of the corresponding sequences, respectively, listed in Table A-1.

[0434] In particular, in the Nanobodies of the invention, at least the CDR3 sequence present is suitably chosen from the group consisting of the CDR3 listed in Table A-1. Preferably, in this aspect, at least one and preferably both of the CDR1 and CDR2 sequences present are suitably chosen from the groups of CDR1 and CDR2 sequences, respectively, that have at least 80%, preferably at least 90%, more preferably at least 95%, even more preferably at least 99% sequence identity with the CDR1 and CDR2 sequences, respectively, listed in Table A-1; and/or from the group consisting of the CDR1 and CDR2 sequences, respectively, that have 3, 2 or only 1 amino acid difference(s) with at least one of the CDR1 and CDR2 sequences, respectively, listed in Table A-1.

[0435] Even more preferably, in the Nanobodies of the invention, at least two of the CDR1, CDR2 and CDR3 sequences present are suitably chosen from the group consisting of the CDR1, CDR2 and CDR3 sequences, respectively, listed in Table A-1. Preferably, in this aspect, the remaining CDR sequence present is suitably chosen from the group of CDR sequences that have at least 80%, preferably at least 90%, more preferably at least 95%, even more preferably at least 99% sequence identity with at least one of the corresponding CDR sequences listed in Table A-1; and/or from the group consisting of CDR sequences that have 3, 2 or only 1 amino acid difference(s) with at least one of the corresponding sequences listed in Table A-1.

[0436] In particular, in the Nanobodies of the invention, at least the CDR3 sequence is suitably chosen from the group consisting of the CDR3 sequences listed in Table A-1, and either the CDR1 sequence or the CDR2 sequence is suitably chosen from the group consisting of the CDR1 and CDR2 sequences, respectively, listed in Table A-1. Preferably, in this aspect, the remaining CDR sequence present is suitably chosen from the group of CDR sequences that have at least 80%, preferably at least 90%, more preferably at least 95%, even more preferably at least 99% sequence identity with at least one of the corresponding CDR sequences listed in Table A-1; and/or from the group consisting of CDR sequences that have 3, 2 or only 1 amino acid difference(s) with the corresponding CDR sequences listed in Table A-1.

[0437] Even more preferably, in the Nanobodies of the invention, all three CDR1, CDR2 and CDR3 sequences present are suitably chosen from the group consisting of the CDR1, CDR2 and CDR3 sequences, respectively, listed in Table A-1.

[0438] Also, generally, the combinations of CDR's listed in Table A-1 (i.e. those mentioned on the same line in Table A-1) are preferred. Thus, it is generally preferred that, when a CDR in a Nanobody of the invention is a CDR sequence mentioned in Table A-1 or is suitably chosen from the group of CDR sequences that have at least 80%, preferably at least 90%, more preferably at least 95%, even more preferably at least 99% sequence identity with a CDR sequence listed in Table A-1; and/or from the group consisting of CDR sequences that have 3, 2 or only 1 amino acid difference(s) with a CDR sequence listed in Table A-1, that at least one and preferably both of the other CDR's are suitably chosen from the CDR sequences that belong to the same combination in Table A-1 (i.e. mentioned on the same line in Table A-1) or are suitably chosen from the group of CDR sequences that have at least 80%, preferably at least 90%, more preferably at least 95%, even more preferably at least 99% sequence identity with the CDR sequence(s) belonging to the same combination and/or from the group consisting of CDR sequences that have 3, 2 or only 1 amino acid difference(s) with the CDR sequence(s) belonging to the same combination. The other preferences indicated in the above paragraphs also apply to the combinations of CDR's mentioned in Table A-1.

[0439] Thus, by means of non-limiting examples, a Nanobody of the invention can for example comprise a CDR1 sequence that has more than 80% sequence identity with one of the CDR1 sequences mentioned in Table A-1, a CDR2 sequence that has 3, 2 or 1 amino acid difference with one of the CDR2 sequences mentioned in Table A-1 (but belonging to a different combination), and a CDR3 sequence.

[0440] Some preferred Nanobodies of the invention may for example comprise: (1) a CDR1 sequence that has more than 80% sequence identity with one of the CDR1 sequences mentioned in Table A-1; a CDR2 sequence that has 3, 2 or 1 amino acid difference with one of the CDR2 sequences mentioned in Table A-1 (but belonging to a different combination); and a CDR3 sequence that has more than 80% sequence identity with one of the CDR3 sequences mentioned in Table A-1 (but belonging to a different combination); or (2) a CDR1 sequence that has more than 80% sequence identity with one of the CDR1 sequences mentioned in Table A-1; a CDR2 sequence, and one of the CDR3 sequences listed in Table A-1; or (3) a CDR1 sequence; a CDR2 sequence that has more than 80% sequence identity with one of the CDR2 sequence listed in Table A-1; and a CDR3 sequence that has 3, 2 or 1 amino acid differences with the CDR3 sequence mentioned in Table A-1 that belongs to the same combination as the CDR2 sequence.

[0441] Some particularly preferred Nanobodies of the invention may for example comprise: (1) a CDR1 sequence that has more than 80% sequence identity with one of the CDR1 sequences mentioned in Table A-1; a CDR2 sequence that has 3, 2 or 1 amino acid difference with the CDR2 sequence mentioned in Table A-1 that belongs to the same combination; and a CDR3 sequence that has more than 80% sequence identity with the CDR3 sequence mentioned in Table A-1 that belongs to the same combination; (2) a CDR1 sequence; a CDR 2 listed in Table A-1 and a CDR3 sequence listed in Table A-1 (in which the CDR2 sequence and CDR3 sequence may belong to different combinations).

[0442] Some even more preferred Nanobodies of the invention may for example comprise: (1) a CDR1 sequence that has more than 80% sequence identity with one of the CDR1 sequences mentioned in Table A-1; the CDR2 sequence listed in Table A-1 that belongs to the same combination; and a CDR3 sequence mentioned in Table A-1 that belongs to a different combination; or (2) a CDR1 sequence mentioned in Table A-1; a CDR2 sequence that has 3, 2 or 1 amino acid differences with the CDR2 sequence mentioned in Table A-1 that belongs to the same combination; and a CDR3 sequence that has more than 80% sequence identity with the CDR3 sequence listed in Table A-1 that belongs to the same or a different combination.

[0443] Particularly preferred Nanobodies of the invention may for example comprise a CDR1 sequence mentioned in Table A-1, a CDR2 sequence that has more than 80% sequence identity with the CDR2 sequence mentioned in Table A-1 that belongs to the same combination; and the CDR3 sequence mentioned in Table A-1 that belongs to the same combination.

[0444] In the most preferred Nanobodies of the invention, the CDR1, CDR2 and CDR3 sequences present are suitably chosen from one of the combinations of CDR1, CDR2 and CDR3 sequences, respectively, listed in Table A-1.

[0445] According to another preferred, but non-limiting aspect of the invention (a) CDR1 has a length of between 1 and 12 amino acid residues, and usually between 2 and 9 amino acid residues, such as 5, 6 or 7 amino acid residues; and/or (b) CDR2 has a length of between 13 and 24 amino acid residues, and usually between 15 and 21 amino acid residues, such as 16 and 17 amino acid residues; and/or (c) CDR3 has a length of between 2 and 35 amino acid residues, and usually between 3 and 30 amino acid residues, such as between 6 and 23 amino acid residues.

[0446] In another preferred, but non-limiting aspect, the invention relates to a Nanobody in which the CDR sequences (as defined herein) have more than 80%, preferably more than 90%, more preferably more than 95%, such as 99% or more sequence identity (as defined herein) with the CDR sequences of at least one of the amino acid sequences of SEQ ID NO's: 560-621.

[0447] Generally, Nanobodies with the above CDR sequences may be as further described herein, and preferably have framework sequences that are also as further described herein. Thus, for example and as mentioned herein, such Nanobodies may be naturally occurring Nanobodies (from any suitable species), naturally occurring V_{HH} sequences (i.e. from a suitable species of Camelid) or synthetic or semi-synthetic amino acid sequences or Nanobodies, including but not limited to partially humanized Nanobodies or V_{HH} sequences, fully humanized Nanobodies or V_{HH} sequences, camelized heavy chain variable domain sequences, as well as Nanobodies that have been obtained by the techniques mentioned herein.

[0448] Thus, in one specific, but non-limiting aspect, the invention relates to a humanized Nanobody, which consists of 4 framework regions (FR1 to FR4 respectively) and 3 complementarity determining regions (CDR1 to CDR3 respectively), in which CDR1 to CDR3 are as defined herein and in which said humanized Nanobody comprises at least one humanizing substitution (as defined herein), and in particular at least one humanizing substitution in at least one of its framework sequences (as defined herein).

[0449] In another preferred, but non-limiting aspect, the invention relates to a Nanobody in which the CDR sequences have at least 70% amino acid identity, preferably at least 80% amino acid identity, more preferably at least 90% amino acid identity, such as 95% amino acid identity or more or even essentially 100% amino acid identity with the CDR sequences of at least one of the amino acid sequences of SEQ ID NO's: 560-621. This degree of amino acid identity can for example be determined by determining the degree of amino acid identity (in a manner described herein) between said Nanobody and one or more of the sequences of SEQ ID NO's: 560-621, in which the amino acid residues that form the framework regions are disregarded. Such Nanobodies can be as further described herein.

[0450] In another preferred, but non-limiting aspect, the invention relates to a Nanobody with an amino acid sequence that is chosen from the group consisting of SEQ ID NO's: 560-621 or from the group consisting of from amino acid sequences that have more than 80%, preferably more than 90%, more preferably more than 95%, such as 99% or more sequence identity (as defined herein) with at least one of the amino acid sequences of SEQ ID NO's: 560-621.

[0451] Another preferred, but non-limiting aspect of the invention relates to humanized variants of the Nanobodies of SEQ ID NO's: 560-621, that comprise, compared to the corresponding native V_{HH} sequence, at least one humanizing substitution (as defined herein), and in particular at least one humanizing substitution in at least one of its framework sequences (as defined herein). Some preferred, but non-limiting examples of such humanized variants are the humanized Nanobodies of SEQ ID NO's: 730-757 and 765. Thus, the invention also relates to a humanized Nanobody with an amino acid sequence that is chosen from the group consisting of SEQ ID NO's: 730-757 and 765 or from the group consisting of from amino acid sequences that have more than 80%, preferably more than 90%, more preferably more than 95%, such as 99% or more sequence identity (as defined herein) with at least one of the amino acid sequences of SEQ ID NO's: 730-757 and 765 (in which amino acid sequences that are chosen from the latter group of amino acid sequences may contain a greater number or a smaller number of humanizing substitutions compared to the corresponding sequence of SEQ ID NO's: 730-757 and 765, as long as they retain at least one of the humanizing substitutions present in the corresponding sequence of SEQ ID NO's: 730-757 and 765).

[0452] The polypeptides of the invention comprise or essentially consist of at least one Nanobody of the invention. Some preferred, but non-limiting examples of polypeptides of the invention are given in SEQ ID NO's: 622-729, 759-762 and 766-789.

[0453] It will be clear to the skilled person that the Nanobodies that are mentioned herein as “preferred” (or “more preferred”, “even more preferred”, etc.) are also preferred (or more preferred, or even more preferred, etc.) for use in the polypeptides described herein. Thus, polypeptides that comprise or essentially consist of one or more “preferred” Nanobodies of the invention will generally be preferred, and polypeptides that comprise or essentially consist of one or more “more preferred” Nanobodies of the invention will generally be more preferred, etc.

[0454] Generally, proteins or polypeptides that comprise or essentially consist of a single Nanobody (such as a single Nanobody of the invention) will be referred to herein as “monovalent” proteins or polypeptides or as “monovalent constructs”. Proteins and polypeptides that comprise or essentially consist of two or more Nanobodies (such as at least two Nanobodies of the invention or at least one Nanobody of the invention and at least one other Nanobody) will be referred to herein as “multivalent” proteins or polypeptides or as “multivalent constructs”, and these may provide certain advantages compared to the corresponding monovalent Nanobodies of the invention. Some non-limiting examples of such multivalent constructs will become clear from the further description herein.

[0455] According to one specific, but non-limiting aspect, a polypeptide of the invention comprises or essentially consists of at least two Nanobodies of the invention, such as two or three Nanobodies of the invention. As further described herein, such multivalent constructs can provide certain advantages compared to a protein or polypeptide comprising or essentially consisting of a single Nanobody of the invention, such as a much improved avidity for RANK-L. Such multivalent constructs will be clear to the skilled person based on the disclosure herein; some preferred, but non-limiting examples of such multivalent Nanobody constructs are the constructs of SEQ ID NO's: 622-693, 761-762 and 766-773 (bivalent) and SEQ ID NO's: 694-729 and 759-760 (trivalent).

[0456] According to another specific, but non-limiting aspect, a polypeptide of the invention comprises or essentially consists of at least one Nanobody of the invention and at least one other binding unit (i.e. directed against another epitope, antigen, target, protein or polypeptide), which is preferably also a Nanobody. Such proteins or polypeptides are also referred to herein as “multispecific” proteins or polypeptides or as ‘multispecific constructs”, and these may provide certain advantages compared to the corresponding monovalent Nanobodies of the invention (as will become clear from the further discussion herein of some preferred, but-nonlimiting multispecific constructs). Such multispecific constructs will be clear to the skilled person based on the disclosure herein; some preferred, but non-limiting examples of such multispecific Nanobody constructs are the constructs of SEQ ID NO's: 694-729 and 759-790.

[0457] According to yet another specific, but non-limiting aspect, a polypeptide of the invention comprises or essentially consists of at least one Nanobody of the invention, optionally one or more further Nanobodies, and at least one other amino acid sequence (such as a protein or polypeptide) that confers at least one desired property to the Nanobody of the invention and/or to the resulting fusion protein. Again, such fusion proteins may provide certain advantages compared to the corresponding monovalent Nanobodies of the invention. Some non-limiting examples of such amino acid sequences and of such fusion constructs will become clear from the further description herein.

[0458] It is also possible to combine two or more of the above aspects, for example to provide a trivalent bispecific construct comprising two Nanobodies of the invention and one other Nanobody, and optionally one or more other amino acid sequences. Further non-limiting examples of such constructs, as well as some constructs that are particularly preferred within the context of the present invention, will become clear from the further description herein.

[0459] In the above constructs, the one or more Nanobodies and/or other amino acid sequences may be directly linked to each other and/or suitably linked to each other via one or more linker sequences. Some suitable but non-limiting examples of such linkers will become clear from the further description herein.

[0460] In one specific aspect of the invention, a Nanobody of the invention or a compound, construct or polypeptide of the invention comprising at least one Nanobody of the invention may have an increased half-life, compared to the corresponding amino acid sequence of the invention. Some preferred, but non-limiting examples of such Nanobodies, compounds and polypeptides will become clear to the skilled person based on the further disclosure herein, and for example comprise Nanobodies sequences or polypeptides of the invention that have been chemically modified to increase the half-life thereof (for example, by means of pegylation); amino acid sequences of the invention that comprise at least one additional binding site for binding to a serum protein (such as serum albumin); or polypeptides of the invention that comprise at least one Nanobody of the invention that is linked to at least one moiety (and in particular at least one amino acid sequence) that increases the half-life of the Nanobody of the invention. Examples of polypeptides of the invention that comprise such half-life extending moieties or amino acid sequences will become clear to the skilled person based on the further disclosure herein; and for example include, without limitation, polypeptides in which the one or more Nanobodies of the invention are suitable linked to one or more serum proteins or fragments thereof (such as serum albumin or suitable fragments thereof) or to one or more binding units that can bind to serum proteins (such as, for example, Nanobodies or (single) domain antibodies that can bind to serum proteins such as serum albumin, serum immunoglobulins such as IgG, or transferrin); polypeptides in which a Nanobody of the invention is linked to an Fc portion (such as a human Fc) or a suitable part or fragment thereof (the invention, for examples envisages polypeptides in which the Nanobodies are suitably linked to an Fc portion by linkers in different sizes to allow intra and/or intermolecular binding of RANK-L); or polypeptides in which the one or more Nanobodies of the invention are suitable linked to one or more small proteins or peptides that can bind to serum proteins (such as, without limitation, the proteins and peptides described in WO 91/01743, WO 01/45746, WO 02/076489 and to the US provisional application of Ablynx N.V. entitled “Peptides capable of binding to serum proteins” of Ablynx N.V. filed on Dec. 5, 2006 (see also PCT/EP2007/063348).

[0461] Again, as will be clear to the skilled person, such Nanobodies, compounds, constructs or polypeptides may contain one or more additional groups, residues, moieties or binding units, such as one or more further amino acid sequences and in particular one or more additional Nanobodies (i.e. not directed against RANK-L), so as to provide a tri- of multispecific Nanobody construct.

[0462] Generally, the Nanobodies of the invention (or compounds, constructs or polypeptides comprising the same) with increased half-life preferably have a half-life that is at least 1.5 times, preferably at least 2 times, such as at least 5 times, for example at least 10 times or more than 20 times, greater than the half-life of the corresponding amino acid sequence of the invention per se. For example, the Nanobodies, compounds, constructs or polypeptides of the invention with increased half-life may have a half-life that is increased with more than 1 hours, preferably more than 2 hours, more preferably more than 6 hours, such as more than 12 hours, or even more than 24, 48 or 72 hours, compared to the corresponding amino acid sequence of the invention per se.

[0463] In a preferred, but non-limiting aspect of the invention, such Nanobodies, compound, constructs or polypeptides of the invention exhibit a serum half-life in human of at least about 12 hours, preferably at least 24 hours, more preferably at least 48 hours, even more preferably at least 72 hours or more. For example, compounds or polypeptides of the invention may have a half-life of at least 5 days (such as about 5 to 10 days), preferably at least 9 days (such as about 9 to 14 days), more preferably at least about 10 days (such as about 10 to 15 days), or at least about 11 days (such as about 11 to 16 days), more preferably at least about 12 days (such as about 12 to 18 days or more), or more than 14 days (such as about 14 to 19 days).

[0464] In another one aspect of the invention, a polypeptide of the invention comprises one or more (such as two or preferably one) Nanobodies of the invention linked (optionally via one or more suitable linker sequences) to one or more (such as two and preferably one) amino acid sequences that allow the resulting polypeptide of the invention to cross the blood brain barrier. In particular, said one or more amino acid sequences that allow the resulting polypeptides of the invention to cross the blood brain barrier may be one or more (such as two and preferably one) Nanobodies, such as the Nanobodies described in WO 02/057445, of which FC44 (SEQ ID NO: 189 of WO 06/040153) and FC5 (SEQ ID NO: 190 of WO 06/040154) are preferred examples.

[0465] In particular, polypeptides comprising one or more Nanobodies of the invention are preferably such that they:
[0466] bind to RANK-L with a dissociation constant (K_{D}) of 10⁻⁵ to 10⁻¹² moles/liter or less, and preferably 10⁻⁷ to 10⁻¹² moles/liter or less and more preferably 10⁻⁸ to 10⁻¹² moles/liter (i.e. with an association constant (K_{A}) of 10⁵ to 10¹² liter/moles or more, and preferably 10⁷ to 10¹² liter/moles or more and more preferably 10⁸ to 10¹² liter/moles);
   and/or such that they:
[0467] bind to RANK-L with a kₒₙ-rate of between 10² M⁻¹s⁻¹ to about 10⁷ M⁻¹s⁻¹, preferably between 10³ M⁻¹s⁻¹ and 10⁷ M⁻¹s⁻¹, more preferably between 10⁴ M⁻¹s⁻¹ and 10⁷ M⁻¹s⁻¹, such as between 10⁵ M⁻¹s⁻¹ and 10⁷ M⁻¹s⁻¹;
   and/or such that they:
[0468] bind to RANK-L with a k_{off} rate between 1 s⁻¹ (t_{1/2}=0.69 s) and 10⁻⁶ s⁻¹ (providing a near irreversible complex with a t_{1/2} of multiple days), preferably between 10⁻² s⁻¹ and 10⁻⁶ s⁻¹, more preferably between 10⁻³ s⁻¹ and 10⁻⁶ s⁻¹, such as between 10⁻⁴ s⁻¹ and 10⁻⁶ s⁻¹.

[0469] Preferably, a polypeptide that contains only one amino acid sequence of the invention is preferably such that it will bind to RANK-L with an affinity less than 500 nM, preferably less than 200 nM, more preferably less than 10 nM, such as less than 500 pM. In this respect, it will be clear to the skilled person that a polypeptide that contains two or more Nanobodies of the invention may bind to RANK-L with an increased avidity, compared to a polypeptide that contains only one amino acid sequence of the invention.

[0470] Some preferred IC₅₀ values for binding of the amino acid sequences or polypeptides of the invention to RANK-L will become clear from the further description and examples herein.

[0471] Other polypeptides according to this preferred aspect of the invention may for example be chosen from the group consisting of amino acid sequences that have more than 80%, preferably more than 90%, more preferably more than 95%, such as 99% or more “sequence identity” (as defined herein) with one or more of the amino acid sequences of SEQ ID NO's: 622-729, 759-762 and 766-773, in which the Nanobodies comprised within said amino acid sequences are preferably as further defined herein.

[0472] Another aspect of this invention relates to a nucleic acid that encodes an amino acid sequence of the invention (such as a Nanobody of the invention) or a polypeptide of the invention comprising the same. Again, as generally described herein for the nucleic acids of the invention, such a nucleic acid may be in the form of a genetic construct, as defined herein.

[0473] In another aspect, the invention relates to host or host cell that expresses or that is capable of expressing an amino acid sequence (such as a Nanobody) of the invention and/or a polypeptide of the invention comprising the same; and/or that contains a nucleic acid of the invention. Some preferred but non-limiting examples of such hosts or host cells will become clear from the further description herein.

[0474] Another aspect of the invention relates to a product or composition containing or comprising at least one amino acid sequence of the invention, at least one polypeptide of the invention and/or at least one nucleic acid of the invention, and optionally one or more further components of such compositions known per se, i.e. depending on the intended use of the composition. Such a product or composition may for example be a pharmaceutical composition (as described herein), a veterinary composition or a product or composition for diagnostic use (as also described herein). Some preferred but non-limiting examples of such products or compositions will become clear from the further description herein.

[0475] The invention further relates to methods for preparing or generating the amino acid sequences, compounds, constructs, polypeptides, nucleic acids, host cells, products and compositions described herein. Some preferred but non-limiting examples of such methods will become clear from the further description herein.

[0476] The invention further relates to applications and uses of the amino acid sequences, compounds, constructs, polypeptides, nucleic acids, host cells, products and compositions described herein, as well as to methods for the prevention and/or treatment for diseases and disorders associated with RANK-L. Some preferred but non-limiting applications and uses will become clear from the further description herein.

[0477] Other aspects, embodiments, advantages and applications of the invention will also become clear from the further description hereinbelow.

[0478] Generally, it should be noted that the term Nanobody as used herein in its broadest sense is not limited to a specific biological source or to a specific method of preparation. For example, as will be discussed in more detail below, the Nanobodies of the invention can generally be obtained: (1) by isolating the V_{HH} domain of a naturally occurring heavy chain antibody; (2) by expression of a nucleotide sequence encoding a naturally occurring V_{HH} domain; (3) by “humanization” (as described herein) of a naturally occurring V_{HH} domain or by expression of a nucleic acid encoding a such humanized V_{HH} domain; (4) by “camelization” (as described herein) of a naturally occurring V_{H} domain from any animal species, and in particular a from species of mammal, such as from a human being, or by expression of a nucleic acid encoding such a camelized V_{H} domain; (5) by “camelisation” of a “domain antibody” or “Dab” as described by Ward et al (supra), or by expression of a nucleic acid encoding such a camelized V_{H} domain; (6) by using synthetic or semi-synthetic techniques for preparing proteins, polypeptides or other amino acid sequences known per se; (7) by preparing a nucleic acid encoding a Nanobody using techniques for nucleic acid synthesis known per se, followed by expression of the nucleic acid thus obtained; and/or (8) by any combination of one or more of the foregoing. Suitable methods and techniques for performing the foregoing will be clear to the skilled person based on the disclosure herein and for example include the methods and techniques described in more detail herein.

[0479] One preferred class of Nanobodies corresponds to the V_{HH} domains of naturally occurring heavy chain antibodies directed against RANK-L. As further described herein, such V_{HH} sequences can generally be generated or obtained by suitably immunizing a species of Camelid with RANK-L (i.e. so as to raise an immune response and/or heavy chain antibodies directed against RANK-L), by obtaining a suitable biological sample from said Camelid (such as a blood sample, serum sample or sample of B-cells), and by generating V_{HH} sequences directed against RANK-L, starting from said sample, using any suitable technique known per se. Such techniques will be clear to the skilled person and/or are further described herein.

[0480] Alternatively, such naturally occurring V_{HH} domains against RANK-L, can be obtained from naïve libraries of Camelid V_{HH} sequences, for example by screening such a library using RANK-L, or at least one part, fragment, antigenic determinant or epitope thereof using one or more screening techniques known per se. Such libraries and techniques are for example described in WO 99/37681, WO 01/90190, WO 03/025020 and WO 03/035694. Alternatively, improved synthetic or semi-synthetic libraries derived from naïve V_{HH} libraries may be used, such as V_{HH} libraries obtained from naïve V_{HH} libraries by techniques such as random mutagenesis and/or CDR shuffling, as for example described in WO 00/43507.

[0481] Thus, in another aspect, the invention relates to a method for generating Nanobodies, that are directed against RANK-L. In one aspect, said method at least comprises the steps of:
[0482] a) providing a set, collection or library of Nanobody sequences; and
[0483] b) screening said set, collection or library of Nanobody sequences for Nanobody sequences that can bind to and/or have affinity for RANK-L;
   and
[0484] c) isolating the amino acid sequence(s) that can bind to and/or have affinity for RANK-L.

[0485] In such a method, the set, collection or library of Nanobody sequences may be a naïve set, collection or library of Nanobody sequences; a synthetic or semi-synthetic set, collection or library of Nanobody sequences; and/or a set, collection or library of Nanobody sequences that have been subjected to affinity maturation.

[0486] In a preferred aspect of this method, the set, collection or library of Nanobody sequences may be an immune set, collection or library of Nanobody sequences, and in particular an immune set, collection or library of V_{HH} sequences, that have been derived from a species of Camelid that has been suitably immunized with RANK-L or with a suitable antigenic determinant based thereon or derived therefrom, such as an antigenic part, fragment, region, domain, loop or other epitope thereof. In one particular aspect, said antigenic determinant may be an extracellular part, region, domain, loop or other extracellular epitope(s).

[0487] In the above methods, the set, collection or library of Nanobody or V_{HH} sequences may be displayed on a phage, phagemid, ribosome or suitable micro-organism (such as yeast), such as to facilitate screening. Suitable methods, techniques and host organisms for displaying and screening (a set, collection or library of) Nanobody sequences will be clear to the person skilled in the art, for example on the basis of the further disclosure herein. Reference is also made to WO 03/054016 and to the review by Hoogenboom in Nature Biotechnology, 23, 9, 1105-1116 (2005).

[0488] In another aspect, the method for generating Nanobody sequences comprises at least the steps of:
[0489] a) providing a collection or sample of cells derived from a species of Camelid that express immunoglobulin sequences;
[0490] b) screening said collection or sample of cells for (i) cells that express an immunoglobulin sequence that can bind to and/or have affinity for RANK-L; and (ii) cells that express heavy chain antibodies, in which substeps (i) and (ii) can be performed essentially as a single screening step or in any suitable order as two separate screening steps, so as to provide at least one cell that expresses a heavy chain antibody that can bind to and/or has affinity for RANK-L;
   and
[0491] c) either (i) isolating from said cell the V_{HH} sequence present in said heavy chain antibody; or (ii) isolating from said cell a nucleic acid sequence that encodes the V_{HH} sequence present in said heavy chain antibody, followed by expressing said V_{HH} domain.

[0492] In the method according to this aspect, the collection or sample of cells may for example be a collection or sample of B-cells. Also, in this method, the sample of cells may be derived from a Camelid that has been suitably immunized with RANK-L or a suitable antigenic determinant based thereon or derived therefrom, such as an antigenic part, fragment, region, domain, loop or other epitope thereof. In one particular aspect, said antigenic determinant may be an extracellular part, region, domain, loop or other extracellular epitope(s).

[0493] The above method may be performed in any suitable manner, as will be clear to the skilled person. Reference is for example made to EP 0 542 810, WO 05/19824, WO 04/051268 and WO 04/106377. The screening of step b) is preferably performed using a flow cytometry technique such as FACS. For this, reference is for example made to Lieby et al., Blood, Vol. 97, No. 12, 3820. Particular reference is made to the so-called “Nanoclone™” technique described in International application WO 06/079372 by Ablynx N.V.

[0494] In another aspect, the method for generating an amino acid sequence directed against RANK-L may comprise at least the steps of:
[0495] a) providing a set, collection or library of nucleic acid sequences encoding heavy chain antibodies or Nanobody sequences;
[0496] b) screening said set, collection or library of nucleic acid sequences for nucleic acid sequences that encode a heavy chain antibody or a Nanobody sequence that can bind to and/or has affinity for RANK-L;
   and
[0497] c) isolating said nucleic acid sequence, followed by expressing the V_{HH} sequence present in said heavy chain antibody or by expressing said Nanobody sequence, respectively.

[0498] In such a method, the set, collection or library of nucleic acid sequences encoding heavy chain antibodies or Nanobody sequences may for example be a set, collection or library of nucleic acid sequences encoding a naïve set, collection or library of heavy chain antibodies or V_{HH} sequences; a set, collection or library of nucleic acid sequences encoding a synthetic or semi-synthetic set, collection or library of Nanobody sequences; and/or a set, collection or library of nucleic acid sequences encoding a set, collection or library of Nanobody sequences that have been subjected to affinity maturation.

[0499] In a preferred aspect of this method, the set, collection or library of amino acid sequences may be an immune set, collection or library of nucleic acid sequences encoding heavy chain antibodies or V_{HH} sequences derived from a Camelid that has been suitably immunized with RANK-L or with a suitable antigenic determinant based thereon or derived therefrom, such as an antigenic part, fragment, region, domain, loop or other epitope thereof. In one particular aspect, said antigenic determinant may be an extracellular part, region, domain, loop or other extracellular epitope(s).

[0500] In the above methods, the set, collection or library of nucleotide sequences may be displayed on a phage, phagemid, ribosome or suitable micro-organism (such as yeast), such as to facilitate screening. Suitable methods, techniques and host organisms for displaying and screening (a set, collection or library of) nucleotide sequences encoding amino acid sequences will be clear to the person skilled in the art, for example on the basis of the further disclosure herein. Reference is also made to WO 03/054016 and to the review by Hoogenboom in Nature Biotechnology, 23, 9, 1105-1116 (2005).

[0501] As will be clear to the skilled person, the screening step of the methods described herein can also be performed as a selection step. Accordingly the term “screening” as used in the present description can comprise selection, screening or any suitable combination of selection and/or screening techniques. Also, when a set, collection or library of sequences is used, it may contain any suitable number of sequences, such as 1, 2, 3 or about 5, 10, 50, 100, 500, 1000, 5000, 10⁴, 10⁵, 10⁶, 10⁷, 10⁸ or more sequences.

[0502] Also, one or more or all of the sequences in the above set, collection or library of amino acid sequences may be obtained or defined by rational, or semi-empirical approaches such as computer modelling techniques or biostatics or datamining techniques.

[0503] Furthermore, such a set, collection or library can comprise one, two or more sequences that are variants from one another (e.g. with designed point mutations or with randomized positions), compromise multiple sequences derived from a diverse set of naturally diversified sequences (e.g. an immune library)), or any other source of diverse sequences (as described for example in Hoogenboom et al, Nat Biotechnol 23:1105, 2005 and Binz et al, Nat Biotechnol 2005, 23:1247). Such set, collection or library of sequences can be displayed on the surface of a phage particle, a ribosome, a bacterium, a yeast cell, a mammalian cell, and linked to the nucleotide sequence encoding the amino acid sequence within these carriers. This makes such set, collection or library amenable to selection procedures to isolate the desired amino acid sequences of the invention. More generally, when a sequence is displayed on a suitable host or host cell, it is also possible (and customary) to first isolate from said host or host cell a nucleotide sequence that encodes the desired sequence, and then to obtain the desired sequence by suitably expressing said nucleotide sequence in a suitable host organism. Again, this can be performed in any suitable manner known per se, as will be clear to the skilled person.

[0504] Yet another technique for obtaining V_{HH} sequences or Nanobody sequences directed against RANK-L involves suitably immunizing a transgenic mammal that is capable of expressing heavy chain antibodies (i.e. so as to raise an immune response and/or heavy chain antibodies directed against RANK-L), obtaining a suitable biological sample from said transgenic mammal that contains (nucleic acid sequences encoding) said V_{HH} sequences or Nanobody sequences (such as a blood sample, serum sample or sample of B-cells), and then generating V_{HH} sequences directed against RANK-L, starting from said sample, using any suitable technique known per se (such as any of the methods described herein or a hybridoma technique). For example, for this purpose, the heavy chain antibody-expressing mice and the further methods and techniques described in WO 02/085945, WO 04/049794 and WO 06/008548 and Janssens et al., Proc. Natl. Acad. Sci. USA. 2006 Oct. 10; 103(41):15130-5 can be used. For example, such heavy chain antibody expressing mice can express heavy chain antibodies with any suitable (single) variable domain, such as (single) variable domains from natural sources (e.g. human (single) variable domains, Camelid (single) variable domains or shark (single) variable domains), as well as for example synthetic or semi-synthetic (single) variable domains.

[0505] The invention also relates to the V_{HH} sequences or Nanobody sequences that are obtained by the above methods, or alternatively by a method that comprises the one of the above methods and in addition at least the steps of determining the nucleotide sequence or amino acid sequence of said V_{HH} sequence or Nanobody sequence; and of expressing or synthesizing said V_{HH} sequence or Nanobody sequence in a manner known per se, such as by expression in a suitable host cell or host organism or by chemical synthesis.

[0506] As mentioned herein, a particularly preferred class of Nanobodies of the invention comprises Nanobodies with an amino acid sequence that corresponds to the amino acid sequence of a naturally occurring V_{HH} domain, but that has been “humanized”, i.e. by replacing one or more amino acid residues in the amino acid sequence of said naturally occurring V_{HH} sequence (and in particular in the framework sequences) by one or more of the amino acid residues that occur at the corresponding position(s) in a V_{H} domain from a conventional 4-chain antibody from a human being (e.g. indicated above). This can be performed in a manner known per se, which will be clear to the skilled person, for example on the basis of the further description herein and the prior art on humanization referred to herein. Again, it should be noted that such humanized Nanobodies of the invention can be obtained in any suitable manner known per se (i.e. as indicated under points (1)-(8) above) and thus are not strictly limited to polypeptides that have been obtained using a polypeptide that comprises a naturally occurring V_{HH} domain as a starting material.

[0507] Another particularly preferred class of Nanobodies of the invention comprises Nanobodies with an amino acid sequence that corresponds to the amino acid sequence of a naturally occurring V_{H} domain, but that has been “camelized”, i.e. by replacing one or more amino acid residues in the amino acid sequence of a naturally occurring V_{H} domain from a conventional 4-chain antibody by one or more of the amino acid residues that occur at the corresponding position(s) in a V_{HH} domain of a heavy chain antibody. This can be performed in a manner known per se, which will be clear to the skilled person, for example on the basis of the further description herein. Such “camelizing” substitutions are preferably inserted at amino acid positions that form and/or are present at the V_{H}-V_{L} interface, and/or at the so-called Camelidae hallmark residues, as defined herein (see for example WO 94/04678 and Davies and Riechmann (1994 and 1996), supra). Preferably, the V_{H} sequence that is used as a starting material or starting point for generating or designing the camelized Nanobody is preferably a V_{H} sequence from a mammal, more preferably the V_{H} sequence of a human being, such as a V_{H}3 sequence. However, it should be noted that such camelized Nanobodies of the invention can be obtained in any suitable manner known per se (i.e. as indicated under points (1)-(8) above) and thus are not strictly limited to polypeptides that have been obtained using a polypeptide that comprises a naturally occurring V_{H} domain as a starting material.

[0508] For example, again as further described herein, both “humanization” and “camelization” can be performed by providing a nucleotide sequence that encodes a naturally occurring V_{HH} domain or V_{H} domain, respectively, and then changing, in a manner known per se, one or more codons in said nucleotide sequence in such a way that the new nucleotide sequence encodes a “humanized” or “camelized” Nanobody of the invention, respectively.

[0509] This nucleic acid can then be expressed in a manner known per se, so as to provide the desired Nanobody of the invention. Alternatively, based on the amino acid sequence of a naturally occurring V_{HH} domain or V_{H} domain, respectively, the amino acid sequence of the desired humanized or camelized Nanobody of the invention, respectively, can be designed and then synthesized de novo using techniques for peptide synthesis known per se. Also, based on the amino acid sequence or nucleotide sequence of a naturally occurring V_{HH} domain or V_{H} domain, respectively, a nucleotide sequence encoding the desired humanized or camelized Nanobody of the invention, respectively, can be designed and then synthesized de novo using techniques for nucleic acid synthesis known per se, after which the nucleic acid thus obtained can be expressed in a manner known per se, so as to provide the desired Nanobody of the invention.

[0510] Other suitable methods and techniques for obtaining the Nanobodies of the invention and/or nucleic acids encoding the same, starting from naturally occurring V_{H} sequences or preferably V_{HH} sequences, will be clear from the skilled person, and may for example comprise combining one or more parts of one or more naturally occurring V_{H} sequences (such as one or more FR sequences and/or CDR sequences), one or more parts of one or more naturally occurring V_{HH} sequences (such as one or more FR sequences or CDR sequences), and/or one or more synthetic or semi-synthetic sequences, in a suitable manner, so as to provide a Nanobody of the invention or a nucleotide sequence or nucleic acid encoding the same (which may then be suitably expressed). Nucleotide sequences encoding framework sequences of V_{HH} sequences or Nanobodies will be clear to the skilled person based on the disclosure herein and/or the further prior art cited herein (and/or may alternatively be obtained by PCR starting from the nucleotide sequences obtained using the methods described herein) and may be suitably combined with nucleotide sequences that encode the desired CDR's (for example, by PCR assembly using overlapping primers), so as to provide a nucleic acid encoding a Nanobody of the invention.

[0511] As mentioned herein, Nanobodies may in particular be characterized by the presence of one or more “Hallmark residues” (as described herein) in one or more of the framework sequences.

[0512] Thus, according to one preferred, but non-limiting aspect of the invention, a Nanobody in its broadest sense can be generally defined as a polypeptide comprising:
[0513] a) an amino acid sequence that is comprised of four framework regions/sequences interrupted by three complementarity determining regions/sequences, in which the amino acid residue at position 108 according to the Kabat numbering is Q;
   and/or:
[0514] b) an amino acid sequence that is comprised of four framework regions/sequences interrupted by three complementarity determining regions/sequences, in which the amino acid residue at position 45 according to the Kabat numbering is a charged amino acid (as defined herein) or a cysteine residue, and position 44 is preferably an E;
   and/or:
[0515] c) an amino acid sequence that is comprised of four framework regions/sequences interrupted by three complementarity determining regions/sequences, in which the amino acid residue at position 103 according to the Kabat numbering is chosen from the group consisting of P, R and S, and is in particular chosen from the group consisting of R and S.

[0516] Thus, in a first preferred, but non-limiting aspect, a Nanobody of the invention may have the structure

FR1-CDR1-FR2-CDR2-FR3-CDR3-FR4

in which FR1 to FR4 refer to framework regions 1 to 4, respectively, and in which CDR1 to CDR3 refer to the complementarity determining regions 1 to 3, respectively, and in which
[0517] a) the amino acid residue at position 108 according to the Kabat numbering is Q;
   and/or in which:
[0518] b) the amino acid residue at position 45 according to the Kabat numbering is a charged amino acid or a cysteine and the amino acid residue at position 44 according to the Kabat numbering is preferably E;
   and/or in which:
[0519] c) the amino acid residue at position 103 according to the Kabat numbering is chosen from the group consisting of P, R and S, and is in particular chosen from the group consisting of R and S;
   and in which:
[0520] d) CDR1, CDR2 and CDR3 are as defined herein, and are preferably as defined according to one of the preferred aspects herein, and are more preferably as defined according to one of the more preferred aspects herein.

[0521] In particular, a Nanobody in its broadest sense can be generally defined as a polypeptide comprising:
[0522] a) an amino acid sequence that is comprised of four framework regions/sequences interrupted by three complementarity determining regions/sequences, in which the amino acid residue at position 108 according to the Kabat numbering is Q;
   and/or:
[0523] b) an amino acid sequence that is comprised of four framework regions/sequences interrupted by three complementarity determining regions/sequences, in which the amino acid residue at position 44 according to the Kabat numbering is E and in which the amino acid residue at position 45 according to the Kabat numbering is an R;
   and/or:
[0524] c) an amino acid sequence that is comprised of four framework regions/sequences interrupted by three complementarity determining regions/sequences, in which the amino acid residue at position 103 according to the Kabat numbering is chosen from the group consisting of P, R and S, and is in particular chosen from the group consisting of R and S.

[0525] Thus, according to a preferred, but non-limiting aspect, a Nanobody of the invention may have the structure

FR1-CDR1-FR2-CDR2-FR3-CDR3-FR4

in which FR1 to FR4 refer to framework regions 1 to 4, respectively, and in which CDR1 to CDR3 refer to the complementarity determining regions 1 to 3, respectively, and in which
[0526] a) the amino acid residue at position 108 according to the Kabat numbering is Q;
   and/or in which:
[0527] b) the amino acid residue at position 44 according to the Kabat numbering is E and in which the amino acid residue at position 45 according to the Kabat numbering is an R;
   and/or in which:
[0528] c) the amino acid residue at position 103 according to the Kabat numbering is chosen from the group consisting of P, R and S, and is in particular chosen from the group consisting of R and S;
   and in which:
[0529] d) CDR1, CDR2 and CDR3 are as defined herein, and are preferably as defined according to one of the preferred aspects herein, and are more preferably as defined according to one of the more preferred aspects herein.

[0530] In particular, a Nanobody against RANK-L according to the invention may have the structure:

FR1-CDR1-FR2-CDR2-FR3-CDR3-FR4

in which FR1 to FR4 refer to framework regions 1 to 4, respectively, and in which CDR1 to CDR3 refer to the complementarity determining regions 1 to 3, respectively, and in which
[0531] a) the amino acid residue at position 108 according to the Kabat numbering is Q;
   and/or in which:
[0532] b) the amino acid residue at position 44 according to the Kabat numbering is E and in which the amino acid residue at position 45 according to the Kabat numbering is an R;
   and/or in which:
[0533] c) the amino acid residue at position 103 according to the Kabat numbering is chosen from the group consisting of P, R and S, and is in particular chosen from the group consisting of R and S;
   and in which:
[0534] d) CDR1, CDR2 and CDR3 are as defined herein, and are preferably as defined according to one of the preferred aspects herein, and are more preferably as defined according to one of the more preferred aspects herein.

[0535] In particular, according to one preferred, but non-limiting aspect of the invention, a Nanobody can generally be defined as a polypeptide comprising an amino acid sequence that is comprised of four framework regions/sequences interrupted by three complementarity determining regions/sequences, in which;
[0536] a-1) the amino acid residue at position 44 according to the Kabat numbering is chosen from the group consisting of A, G, E, D, G, Q, R, S, L; and is preferably chosen from the group consisting of G, E or Q; and
[0537] a-2) the amino acid residue at position 45 according to the Kabat numbering is chosen from the group consisting of L, R or C; and is preferably chosen from the group consisting of L or R; and
[0538] a-3) the amino acid residue at position 103 according to the Kabat numbering is chosen from the group consisting of W, R or S; and is preferably W or R, and is most preferably W;
[0539] a-4) the amino acid residue at position 108 according to the Kabat numbering is Q;
   or in which:
[0540] b-1) the amino acid residue at position 44 according to the Kabat numbering is chosen from the group consisting of E and Q; and
[0541] b-2) the amino acid residue at position 45 according to the Kabat numbering is R; and
[0542] b-3) the amino acid residue at position 103 according to the Kabat numbering is chosen from the group consisting of W, R and S; and is preferably W;
[0543] b-4) the amino acid residue at position 108 according to the Kabat numbering is chosen from the group consisting of Q and L; and is preferably Q;
   or in which:
[0544] c-1) the amino acid residue at position 44 according to the Kabat numbering is chosen from the group consisting of A, G, E, D, Q, R, S and L; and is preferably chosen from the group consisting of G, E and Q; and
[0545] c-2) the amino acid residue at position 45 according to the Kabat numbering is chosen from the group consisting of L, R and C; and is preferably chosen from the group consisting of L and R; and
[0546] c-3) the amino acid residue at position 103 according to the Kabat numbering is chosen from the group consisting of P, R and S; and is in particular chosen from the group consisting of R and S; and
[0547] c-4) the amino acid residue at position 108 according to the Kabat numbering is chosen from the group consisting of Q and L; is preferably Q;
   and in which
[0548] d) CDR1, CDR2 and CDR3 are as defined herein, and are preferably as defined according to one of the preferred aspects herein, and are more preferably as defined according to one of the more preferred aspects herein.

[0549] Thus, in another preferred, but non-limiting aspect, a Nanobody of the invention may have the structure

FR1-CDR1-FR2-CDR2-FR3-CDR3-FR4

in which FR1 to FR4 refer to framework regions 1 to 4, respectively, and in which CDR1 to CDR3 refer to the complementarity determining regions 1 to 3, respectively, and in which:
[0550] a-1) the amino acid residue at position 44 according to the Kabat numbering is chosen from the group consisting of A, G, E, D, G, Q, R, S, L; and is preferably chosen from the group consisting of G, E or Q;
   and in which:
[0551] a-2) the amino acid residue at position 45 according to the Kabat numbering is chosen from the group consisting of L, R or C; and is preferably chosen from the group consisting of L or R;
   and in which:
[0552] a-3) the amino acid residue at position 103 according to the Kabat numbering is chosen from the group consisting of W, R or S; and is preferably W or R, and is most preferably W;
   and in which
[0553] a-4) the amino acid residue at position 108 according to the Kabat numbering is Q; and in which:
[0554] d) CDR1, CDR2 and CDR3 are as defined herein, and are preferably as defined according to one of the preferred aspects herein, and are more preferably as defined according to one of the more preferred aspects herein.

[0555] In another preferred, but non-limiting aspect, a Nanobody of the invention may have the structure

FR1-CDR1-FR2-CDR2-FR3-CDR3-FR4

in which FR1 to FR4 refer to framework regions 1 to 4, respectively, and in which CDR1 to CDR3 refer to the complementarity determining regions 1 to 3, respectively, and in which:
[0556] b-1) the amino acid residue at position 44 according to the Kabat numbering is chosen from the group consisting of E and Q;
   and in which:
[0557] b-2) the amino acid residue at position 45 according to the Kabat numbering is R;
   and in which:
[0558] b-3) the amino acid residue at position 103 according to the Kabat numbering is chosen from the group consisting of W, R and S; and is preferably W;
   and in which:
[0559] b-4) the amino acid residue at position 108 according to the Kabat numbering is chosen from the group consisting of Q and L; and is preferably Q;
   and in which:
[0560] d) CDR1, CDR2 and CDR3 are as defined herein, and are preferably as defined according to one of the preferred aspects herein, and are more preferably as defined according to one of the more preferred aspects herein.

[0561] In another preferred, but non-limiting aspect, a Nanobody of the invention may have the structure

FR1-CDR1-FR2-CDR2-FR3-CDR3-FR4

in which FR1 to FR4 refer to framework regions 1 to 4, respectively, and in which CDR1 to CDR3 refer to the complementarity determining regions 1 to 3, respectively, and in which:
[0562] c-1) the amino acid residue at position 44 according to the Kabat numbering is chosen from the group consisting of A, G, E, D, Q, R, S and L; and is preferably chosen from the group consisting of G, E and Q;
   and in which:
[0563] c-2) the amino acid residue at position 45 according to the Kabat numbering is chosen from the group consisting of L, R and C; and is preferably chosen from the group consisting of L and R;
   and in which:
[0564] c-3) the amino acid residue at position 103 according to the Kabat numbering is chosen from the group consisting of P, R and S; and is in particular chosen from the group consisting of R and S;
   and in which:
[0565] c-4) the amino acid residue at position 108 according to the Kabat numbering is chosen from the group consisting of Q and L; is preferably Q;
   and in which:
[0566] d) CDR1, CDR2 and CDR3 are as defined herein, and are preferably as defined according to one of the preferred aspects herein, and are more preferably as defined according to one of the more preferred aspects herein.

[0567] Two particularly preferred, but non-limiting groups of the Nanobodies of the invention are those according to a) above; according to (a-1) to (a-4) above; according to b) above; according to (b-1) to (b-4) above; according to (c) above; and/or according to (c-1) to (c-4) above, in which either:
[0568] i) the amino acid residues at positions 44-47 according to the Kabat numbering form the sequence GLEW (or a GLEW-like sequence as described herein) and the amino acid residue at position 108 is Q;
   or in which:
[0569] ii) the amino acid residues at positions 43-46 according to the Kabat numbering form the sequence KERE or KQRE (or a KERE-like sequence as described) and the amino acid residue at position 108 is Q or L, and is preferably Q.

[0570] Thus, in another preferred, but non-limiting aspect, a Nanobody of the invention may have the structure

FR1-CDR1-FR2-CDR2-FR3-CDR3-FR4

in which FR1 to FR4 refer to framework regions 1 to 4, respectively, and in which CDR1 to CDR3 refer to the complementarity determining regions 1 to 3, respectively, and in which:
[0571] i) the amino acid residues at positions 44-47 according to the Kabat numbering form the sequence GLEW (or a GLEW-like sequence as defined herein) and the amino acid residue at position 108 is Q;
   and in which:
[0572] ii) CDR1, CDR2 and CDR3 are as defined herein, and are preferably as defined according to one of the preferred aspects herein, and are more preferably as defined according to one of the more preferred aspects herein.

[0573] In another preferred, but non-limiting aspect, a Nanobody of the invention may have the structure

FR1-CDR1-FR2-CDR2-FR3-CDR3-FR4

in which FR1 to FR4 refer to framework regions 1 to 4, respectively, and in which CDR1 to CDR3 refer to the complementarity determining regions 1 to 3, respectively, and in which:
[0574] i) the amino acid residues at positions 43-46 according to the Kabat numbering form the sequence KERE or KQRE (or a KERE-like sequence) and the amino acid residue at position 108 is Q or L, and is preferably Q;
   and in which:
[0575] ii) CDR1, CDR2 and CDR3 are as defined herein, and are preferably as defined according to one of the preferred aspects herein, and are more preferably as defined according to one of the more preferred aspects herein.

[0576] In the Nanobodies of the invention in which the amino acid residues at positions 43-46 according to the Kabat numbering form the sequence KERE or KQRE, the amino acid residue at position 37 is most preferably F. In the Nanobodies of the invention in which the amino acid residues at positions 44-47 according to the Kabat numbering form the sequence GLEW, the amino acid residue at position 37 is chosen from the group consisting of Y, H, I, L, V or F, and is most preferably V.

[0577] Thus, without being limited hereto in any way, on the basis of the amino acid residues present on the positions mentioned above, the Nanobodies of the invention can generally be classified on the basis of the following three groups:
[0578] i) The “GLEW-group”: Nanobodies with the amino acid sequence GLEW at positions 44-47 according to the Kabat numbering and Q at position 108 according to the Kabat numbering. As further described herein, Nanobodies within this group usually have a V at position 37, and can have a W, P, R or S at position 103, and preferably have a W at position 103. The GLEW group also comprises some GLEW-like sequences such as those mentioned in Table A-3 below. More generally, and without limitation, Nanobodies belonging to the GLEW-group can be defined as Nanobodies with a G at position 44 and/or with a W at position 47, in which position 46 is usually E and in which preferably position 45 is not a charged amino acid residue and not cysteine;
[0579] ii) The “KERE-group”: Nanobodies with the amino acid sequence KERE or KQRE (or another KERE-like sequence) at positions 43-46 according to the Kabat numbering and Q or L at position 108 according to the Kabat numbering. As further described herein, Nanobodies within this group usually have a F at position 37, an L or F at position 47; and can have a W, P, R or S at position 103, and preferably have a W at position 103. More generally, and without limitation, Nanobodies belonging to the KERE-group can be defined as Nanobodies with a K, Q or R at position 44 (usually K) in which position 45 is a charged amino acid residue or cysteine, and position 47 is as further defined herein;
[0580] iii) The “103 P, R, S-group”: Nanobodies with a P, R or S at position 103. These Nanobodies can have either the amino acid sequence GLEW at positions 44-47 according to the Kabat numbering or the amino acid sequence KERE or KQRE at positions 43-46 according to the Kabat numbering, the latter most preferably in combination with an F at position 37 and an L or an F at position 47 (as defined for the KERE-group); and can have Q or L at position 108 according to the Kabat numbering, and preferably have Q.

[0581] Also, where appropriate, Nanobodies may belong to (i.e. have characteristics of) two or more of these classes. For example, one specifically preferred group of Nanobodies has GLEW or a GLEW-like sequence at positions 44-47; P, R or S (and in particular R) at position 103; and Q at position 108 (which may be humanized to L).

[0582] More generally, it should be noted that the definitions referred to above describe and apply to Nanobodies in the form of a native (i.e. non-humanized) V_{HH} sequence, and that humanized variants of these Nanobodies may contain other amino acid residues than those indicated above (i.e. one or more humanizing substitutions as defined herein). For example, and without limitation, in some humanized Nanobodies of the GLEW-group or the 103 P, R, S-group, Q at position 108 may be humanized to 108L. As already mentioned herein, other humanizing substitutions (and suitable combinations thereof) will become clear to the skilled person based on the disclosure herein. In addition, or alternatively, other potentially useful humanizing substitutions can be ascertained by comparing the sequence of the framework regions of a naturally occurring V_{HH} sequence with the corresponding framework sequence of one or more closely related human V_{H} sequences, after which one or more of the potentially useful humanizing substitutions (or combinations thereof) thus determined can be introduced into said V_{HH} sequence (in any manner known per se, as further described herein) and the resulting humanized V_{HH} sequences can be tested for affinity for the target, for stability, for ease and level of expression, and/or for other desired properties. In this way, by means of a limited degree of trial and error, other suitable humanizing substitutions (or suitable combinations thereof) can be determined by the skilled person based on the disclosure herein. Also, based on the foregoing, (the framework regions of) a Nanobody may be partially humanized or fully humanized.

[0583] Thus, in another preferred, but non-limiting aspect, a Nanobody of the invention may be a Nanobody belonging to the GLEW-group (as defined herein), and in which CDR1, CDR2 and CDR3 are as defined herein, and are preferably as defined according to one of the preferred aspects herein, and are more preferably as defined according to one of the more preferred aspects herein.

[0584] In another preferred, but non-limiting aspect, a Nanobody of the invention may be a Nanobody belonging to the KERE-group (as defined herein), and CDR1, CDR2 and CDR3 are as defined herein, and are preferably as defined according to one of the preferred aspects herein, and are more preferably as defined according to one of the more preferred aspects herein.

[0585] Thus, in another preferred, but non-limiting aspect, a Nanobody of the invention may be a Nanobody belonging to the 103 P, R, S-group (as defined herein), and in which CDR1, CDR2 and CDR3 are as defined herein, and are preferably as defined according to one of the preferred aspects herein, and are more preferably as defined according to one of the more preferred aspects herein.

[0586] Also, more generally and in addition to the 108Q, 43E/44R and 103 P,R,S residues mentioned above, the Nanobodies of the invention can contain, at one or more positions that in a conventional V_{H} domain would form (part of) the V_{H}/V_{L} interface, one or more amino acid residues that are more highly charged than the amino acid residues that naturally occur at the same position(s) in the corresponding naturally occurring V_{H} sequence, and in particular one or more charged amino acid residues (as mentioned in Table A-2). Such substitutions include, but are not limited to, the GLEW-like sequences mentioned in Table A-3 below; as well as the substitutions that are described in the International Application WO 00/29004 for so-called “microbodies”, e.g. so as to obtain a Nanobody with Q at position 108 in combination with KLEW at positions 44-47. Other possible substitutions at these positions will be clear to the skilled person based upon the disclosure herein.

[0587] In one aspect of the Nanobodies of the invention, the amino acid residue at position 83 is chosen from the group consisting of L, M, S, V and W; and is preferably L.

[0588] Also, in one aspect of the Nanobodies of the invention, the amino acid residue at position 83 is chosen from the group consisting of R, K, N, E, G, I, T and Q; and is most preferably either K or E (for Nanobodies corresponding to naturally occurring V_{HH} domains) or R (for “humanized” Nanobodies, as described herein). The amino acid residue at position 84 is chosen from the group consisting of P, A, R, S, D T, and V in one aspect, and is most preferably P (for Nanobodies corresponding to naturally occurring V_{HH} domains) or R (for “humanized” Nanobodies, as described herein).

[0589] Furthermore, in one aspect of the Nanobodies of the invention, the amino acid residue at position 104 is chosen from the group consisting of G and D; and is most preferably G.

[0590] Collectively, the amino acid residues at positions 11, 37, 44, 45, 47, 83, 84, 103, 104 and 108, which in the Nanobodies are as mentioned above, will also be referred to herein as the “Hallmark Residues”. The Hallmark Residues and the amino acid residues at the corresponding positions of the most closely related human V_{H} domain, V_{H}3, are summarized in Table A-3.

[0591] Some especially preferred but non-limiting combinations of these Hallmark Residues as occur in naturally occurring V_{HH} domains are mentioned in Table A-4. For comparison, the corresponding amino acid residues of the human V_{H}3 called DP-47 have been indicated in italics.

TABLE A-3
Hallmark Residues in Nanobodies

| Position | Human V_{H}3 | Hallmark Residues |
|---|---|---|
| 11 | L, V; predominantly L | L, M, S, V, W; preferably L |
| 37 | V, I, F; usually V | F⁽¹⁾, Y, H, I, L or V, preferably F⁽¹⁾ or Y |
| 44⁽⁸⁾ | G | G⁽²⁾, E⁽³⁾, A, D, Q, R, S, L; |
| | | preferably G⁽²⁾, E⁽³⁾ or Q; |
| | | most preferably G⁽²⁾ or E⁽³⁾. |
| 45⁽⁸⁾ | L | L⁽²⁾, R⁽³⁾, C, I, L, P, Q, V; preferably L⁽²⁾ |
| | | or R⁽³⁾ |
| 47⁽⁸⁾ | W, Y | W⁽²⁾, L⁽¹⁾ or F⁽¹⁾, A, G, I, M, R, S, V or |
| | | Y; preferably W⁽²⁾, L⁽¹⁾, F⁽¹⁾ or R |
| 83 | R or K; usually R | R, K⁽⁵⁾, N, E⁽⁵⁾, G, I, M, Q or T; |
| | | preferably K or R; most preferably K |
| 84 | A, T, D; predominantly A | P⁽⁵⁾, A, L, R, S, T, D, V; preferably P |
| 103 | W | W⁽⁴⁾, P⁽⁶⁾, R⁽⁶⁾, S; preferably W |
| 104 | G | G or D; preferably G |
| 108 | L, M or T; predominantly L | Q, L⁽⁷⁾ or R; preferably Q or L⁽⁷⁾ |

Notes:
⁽¹⁾In particular, but not exclusively, in combination with KERE or KQRE at positions 43-46.
⁽²⁾Usually as GLEW at positions 44-47.
⁽³⁾Usually as KERE or KQRE at positions 43-46, e.g. as KEREL, KEREF, KQREL, KQREF or KEREG at positions 43-47. Alternatively, also sequences such as TERE (for example TEREL), KECE (for example KECEL or KECER), RERE (for example REREG), QERE (for example QEREG), KGRE (for example KGREG), KDRE (for example KDREV) are possible. Some other possible, but less preferred sequences include for example DECKL and NVCEL.
⁽⁴⁾With both GLEW at positions 44-47 and KERE or KQRE at positions 43-46.
⁽⁵⁾Often as KP or EP at positions 83-84 of naturally occurring V_{HH} domains.
⁽⁶⁾In particular, but not exclusively, in combination with GLEW at positions 44-47.
⁽⁷⁾With the proviso that when positions 44-47 are GLEW, position 108 is always Q in (non-humanized) V_{HH} sequences that also contain a W at position 103.
The GLEW group also contains GLEW-like sequences at positions 44-47, such as for example GVEW, EPEW, GLER, DQEW, DLEW, GIEW, ELEW, GPEW, EWLP, GPER, GLER and ELEW.

TABLE A-4
Some preferred but non-limiting combinations of Hallmark
Residues in naturally occurring Nanobodies.

| | 11 | 37 | 44 | 45 | 47 | 83 | 84 | 103 | 104 | 108 |
|---|---|---|---|---|---|---|---|---|---|---|
| DP-47 (human) | M | V | G | L | W | R | A | W | G | L |
| “KERE” group | L | F | E | R | L | K | P | W | G | Q |
| | L | F | E | R | F | E | P | W | G | Q |
| | L | F | E | R | F | K | P | W | G | Q |
| | L | Y | Q | R | L | K | P | W | G | Q |
| | L | F | L | R | V | K | P | Q | G | Q |
| | L | F | Q | R | L | K | P | W | G | Q |
| | L | F | E | R | F | K | P | W | G | Q |
| “GLEW” group | L | V | G | L | W | K | S | W | G | Q |
| | M | V | G | L | W | K | P | R | G | Q |

For humanization of these combinations, reference is made to the specification.

[0592] In the Nanobodies, each amino acid residue at any other position than the Hallmark Residues can be any amino acid residue that naturally occurs at the corresponding position (according to the Kabat numbering) of a naturally occurring V_{HH} domain.

[0593] Such amino acid residues will be clear to the skilled person. Tables A-5 to A-8 mention some non-limiting residues that can be present at each position (according to the Kabat numbering) of the FR1, FR2, FR3 and FR4 of naturally occurring V_{HH} domains. For each position, the amino acid residue that most frequently occurs at each position of a naturally occurring V_{HH} domain (and which is the most preferred amino acid residue for said position in a Nanobody) is indicated in bold; and other preferred amino acid residues for each position have been underlined (note: the number of amino acid residues that are found at positions 26-30 of naturally occurring V_{HH} domains supports the hypothesis underlying the numbering by Chothia (supra) that the residues at these positions already form part of CDR1).

[0594] In Tables A-5-A-8, some of the non-limiting residues that can be present at each position of a human V_{H}3 domain have also been mentioned. Again, for each position, the amino acid residue that most frequently occurs at each position of a naturally occurring human V_{H}3 domain is indicated in bold; and other preferred amino acid residues have been underlined.

[0595] For reference only, Tables A-5-A-8 also contain data on the V_{HH} entropy (“V_{HH} Ent.”) and V_{HH} variability (“V_{HH} Var.”) at each amino acid position for a representative sample of 1118 V_{HH} sequences (data kindly provided by David Lutje Hulsing and Prof. Theo Verrips of Utrecht University). The values for the V_{HH} entropy and the V_{HH} variability provide a measure for the variability and degree of conservation of amino acid residues between the 1118 V_{HH} sequences analyzed: low values (i.e. <1, such as <0.5) indicate that an amino acid residue is highly conserved between the V_{HH} sequences (i.e. little variability). For example, the G at position 8 and the G at position 9 have values for the V_{HH} entropy of 0.1 and 0 respectively, indicating that these residues are highly conserved and have little variability (and in case of position 9 is G in all 1118 sequences analysed), whereas for residues that form part of the CDR's generally values of 1.5 or more are found (data not shown). Note that (1) the amino acid residues listed in the second column of Tables A-5-A-8 are based on a bigger sample than the 1118 V_{HH} sequences that were analysed for determining the V_{HH} entropy and V_{HH} variability referred to in the last two columns; and (2) the data represented below support the hypothesis that the amino acid residues at positions 27-30 and maybe even also at positions 93 and 94 already form part of the CDR's (although the invention is not limited to any specific hypothesis or explanation, and as mentioned above, herein the numbering according to Kabat is used). For a general explanation of sequence entropy, sequence variability and the methodology for determining the same, see Oliveira et al., PROTEINS: Structure, Function and Genetics, 52: 544-552 (2003).

TABLE A-5
Non-limiting examples of amino acid residues in FR1
(for the footnotes, see the footnotes to Table A-3)

| | Amino acid residue(s): | | V_{HH} | V_{HH} |
|---|---|---|---|---|
| Pos. | Human V_{H}3 | Camelid V_{HH}'s | Ent. | Var. |
| 1 | E, Q | Q, A, E | — | — |
| 2 | V | V | 0.2 | 1 |
| 3 | Q | Q, K | 0.3 | 2 |
| 4 | L | L | 0.1 | 1 |
| 5 | V, L | Q, E, L, V | 0.8 | 3 |
| 6 | E | E, D, Q, A | 0.8 | 4 |
| 7 | S, T | S, F | 0.3 | 2 |
| 8 | G, R | G | 0.1 | 1 |
| 9 | G | G | 0 | 1 |
| 10 | G, V | G, D, R | 0.3 | 2 |
| 11 | Hallmark residue: L, M, S, V, W; preferably L | | 0.8 | 2 |
| 12 | V, I | V, A | 0.2 | 2 |
| 13 | Q, K, R | Q, E, K, P, R | 0.4 | 4 |
| 14 | P | A, Q, A, G, P, S, T, V | 1 | 5 |
| 15 | G | G | 0 | 1 |
| 16 | G, R | G, A, E, D | 0.4 | 3 |
| 17 | S | S, F | 0.5 | 2 |
| 18 | L | L, V | 0.1 | 1 |
| 19 | R, K | R, K, L, N, S, T | 0.6 | 4 |
| 20 | L | L, F, I, V | 0.5 | 4 |
| 21 | S | S, A, F, T | 0.2 | 3 |
| 22 | C | C | 0 | 1 |
| 23 | A, T | A, D, E, P, S, T, V | 1.3 | 5 |
| 24 | A | A, I, L, S, T, V | 1 | 6 |
| 25 | S | S, A, F, P, T | 0.5 | 5 |
| 26 | G | G, A, D, E, R, S, T, V | 0.7 | 7 |
| 27 | F | S, F, R, L, P, G, N, | 2.3 | 13 |
| 28 | T | N, T, E, D, S, I, R, A, G, R, F, Y | 1.7 | 11 |
| 29 | F, V | F, L, D, S, I, G, V, A | 1.9 | 11 |
| 30 | S, D, G | N, S, E, G, A, D, M, T | 1.8 | 11 |

TABLE A-6
Non-limiting examples of amino acid residues in FR2
(for the footnotes, see the footnotes to Table A-3)

| | Amino acid residue(s): | | V_{HH} | V_{HH} |
|---|---|---|---|---|
| Pos. | Human V_{H}3 | Camelid V_{HH}'s | Ent. | Var. |
| 36 | W | W | 0.1 | 1 |
| 37 | Hallmark residue: F⁽¹⁾, H, I, L, Y or V, preferably F⁽¹⁾ or Y | | 1.1 | 6 |
| 38 | R | R | 0.2 | 1 |
| 39 | Q | Q, H, P, R | 0.3 | 2 |
| 40 | A | A, F, G, L, P, T, V | 0.9 | 7 |
| 41 | P, S, T | P, A, L, S | 0.4 | 3 |
| 42 | G | G, E | 0.2 | 2 |
| 43 | K | K, D, E, N, Q, R, T, V | 0.7 | 6 |
| 44 | Hallmark residue: G⁽²⁾, E⁽³⁾, A, D, Q, R, S, L; preferably G⁽²⁾, E⁽³⁾ or | | 1.3 | 5 |
| | Q; most preferably G⁽²⁾ or E⁽³⁾ | | | |
| 45 | Hallmark residue: L⁽²⁾, R⁽³⁾, C, I, L, P, Q, V; preferably L⁽²⁾ or R⁽³⁾ | | 0.6 | 4 |
| 46 | E, V | E, D, K, Q, V | 0.4 | 2 |
| 47 | Hallmark residue: W⁽²⁾, L⁽¹⁾ or F⁽¹⁾, A, G, I, M, R, S, V or Y; | | 1.9 | 9 |
| | preferably W⁽²⁾, L⁽¹⁾, F⁽¹⁾ or R | | | |
| 48 | V | V, I, L | 0.4 | 3 |
| 49 | S, A, G | A, S, G, T, V | 0.8 | 3 |

TABLE A-7
Non-limiting examples of amino acid residues in FR3
(for the footnotes, see the footnotes to Table A-3)

| | Amino acid residue(s): | | V_{HH} | V_{HH} |
|---|---|---|---|---|
| Pos. | Human V_{H}3 | Camelid V_{HH}'s | Ent. | Var. |
| 66 | R | R | 0.1 | 1 |
| 67 | F | F, L, V | 0.1 | 1 |
| 68 | T | T, A, N, S | 0.5 | 4 |
| 69 | I | I, L, M, V | 0.4 | 4 |
| 70 | S | S, A, F, T | 0.3 | 4 |
| 71 | R | R, G, H, I, L, K, Q, S, T, W | 1.2 | 8 |
| 72 | D, E | D, E, G, N, V | 0.5 | 4 |
| 73 | N, D, G | N, A, D, F, I, K, L, R, S, T, V, Y | 1.2 | 9 |
| 74 | A, S | A, D, G, N, P, S, T, V | 1 | 7 |
| 75 | K | K, A, E, K, L, N, Q, R | 0.9 | 6 |
| 76 | N, S | N, D, K, R, S, T, Y | 0.9 | 6 |
| 77 | S, T, I | T, A, E, I, M, P, S | 0.8 | 5 |
| 78 | L, A | V, L, A, F, G, I, M | 1.2 | 5 |
| 79 | Y, H | Y, A, D, F, H, N, S, T | 1 | 7 |
| 80 | L | L, F, V | 0.1 | 1 |
| 81 | Q | Q, E, I, L, R, T | 0.6 | 5 |
| 82 | M | M, I, L, V | 0.2 | 2 |
| 82a | N, G | N, D, G, H, S, T | 0.8 | 4 |
| 82b | S | S, N, D, G, R, T | 1 | 6 |
| 82c | L | L, P, V | 0.1 | 2 |
| 83 | Hallmark residue: R, K⁽⁵⁾, N, E⁽⁵⁾, G, I, M, Q or T; preferably K or | | 0.9 | 7 |
| | R; most preferably K | | | |
| 84 | Hallmark residue: P⁽⁵⁾, A, D, L, R, S, T, V; preferably P | | 0.7 | 6 |
| 85 | E, G | E, D, G, Q | 0.5 | 3 |
| 86 | D | D | 0 | 1 |
| 87 | T, M | T, A, S | 0.2 | 3 |
| 88 | A | A, G, S | 0.3 | 2 |
| 89 | V, L | V, A, D, I, L, M, N, R, T | 1.4 | 6 |
| 90 | Y | Y, F | 0 | 1 |
| 91 | Y, H | Y, D, F, H, L, S, T, V | 0.6 | 4 |
| 92 | C | C | 0 | 1 |
| 93 | A, K, T | A, N, G, H, K, N, R, S, T, V, Y | 1.4 | 10 |
| 94 | K, R, T | A, V, C, F, G, I, K, L, R, S or T | 1.6 | 9 |

TABLE A-8
Non-limiting examples of amino acid residues in FR4
(for the footnotes, see the footnotes to Table A-3)

| | Amino acid residue(s): | | V_{HH} | V_{HH} |
|---|---|---|---|---|
| Pos. | Human V_{H}3 | Camelid V_{HH}'s | Ent. | Var. |
| 103 | Hallmark residue: W⁽⁴⁾, P⁽⁶⁾, R⁽⁶⁾, S; preferably W | | 0.4 | 2 |
| 104 | Hallmark residue: G or D; preferably G | | 0.1 | 1 |
| 105 | Q, R | Q, E, K, P, R | 0.6 | 4 |
| 106 | G | G | 0.1 | 1 |
| 107 | T | T, A, I | 0.3 | 2 |
| 108 | Hallmark residue: Q, L⁽⁷⁾ or R; preferably Q or L⁽⁷⁾ | | 0.4 | 3 |
| 109 | V | V | 0.1 | 1 |
| 110 | T | T, I, A | 0.2 | 1 |
| 111 | V | V, A, I | 0.3 | 2 |
| 112 | S | S, F | 0.3 | 1 |
| 113 | S | S, A, L, P, T | 0.4 | 3 |

[0596] Thus, in another preferred, but not limiting aspect, a Nanobody of the invention can be defined as an amino acid sequence with the (general) structure

FR1-CDR1-FR2-CDR2-FR3-CDR3-FR4

[0597] in which FR1 to FR4 refer to framework regions 1 to 4, respectively, and in which CDR1 to CDR3 refer to the complementarity determining regions 1 to 3, respectively, and in which:
[0598] i) one or more of the amino acid residues at positions 11, 37, 44, 45, 47, 83, 84, 103, 104 and 108 according to the Kabat numbering are chosen from the Hallmark residues mentioned in Table A-3;
   and in which:
[0599] ii) CDR1, CDR2 and CDR3 are as defined herein, and are preferably as defined according to one of the preferred aspects herein, and are more preferably as defined according to one of the more preferred aspects herein.

[0600] The above Nanobodies may for example be V_{HH} sequences or may be humanized Nanobodies. When the above Nanobody sequences are V_{HH} sequences, they may be suitably humanized, as further described herein. When the Nanobodies are partially humanized Nanobodies, they may optionally be further suitably humanized, again as described herein.

[0601] In particular, a Nanobody of the invention can be an amino acid sequence with the (general) structure

FR1-CDR1-FR2-CDR2-FR3-CDR3-FR4

in which FR1 to FR4 refer to framework regions 1 to 4, respectively, and in which CDR1 to CDR3 refer to the complementarity determining regions 1 to 3, respectively, and in which:
[0602] i) (preferably) one or more of the amino acid residues at positions 11, 37, 44, 45, 47, 83, 84, 103, 104 and 108 according to the Kabat numbering are chosen from the Hallmark residues mentioned in Table A-3 (it being understood that V_{HH} sequences will contain one or more Hallmark residues; and that partially humanized Nanobodies will usually, and preferably, [still] contain one or more Hallmark residues [although it is also within the scope of the invention to provide—where suitable in accordance with the invention—partially humanized Nanobodies in which all Hallmark residues, but not one or more of the other amino acid residues, have been humanized]; and that in fully humanized Nanobodies, where suitable in accordance with the invention, all amino acid residues at the positions of the Hallmark residues will be amino acid residues that occur in a human V_{H}3 sequence. As will be clear to the skilled person based on the disclosure herein that such V_{HH} sequences, such partially humanized Nanobodies with at least one Hallmark residue, such partially humanized Nanobodies without Hallmark residues and such fully humanized Nanobodies all form aspects of this invention);
   and in which:
[0603] ii) said amino acid sequence has at least 80% amino acid identity with at least one of the amino acid sequences of SEQ ID NO's: 1 to 22, in which for the purposes of determining the degree of amino acid identity, the amino acid residues that form the CDR sequences (indicated with X in the sequences of SEQ ID NO's: 1 to 22) are disregarded;
   and in which:
[0604] iii) CDR1, CDR2 and CDR3 are as defined herein, and are preferably as defined according to one of the preferred aspects herein, and are more preferably as defined according to one of the more preferred aspects herein.

[0605] The above Nanobodies may for example be V_{HH} sequences or may be humanized Nanobodies. When the above Nanobody sequences are V_{HH} sequences, they may be suitably humanized, as further described herein. When the Nanobodies are partially humanized Nanobodies, they may optionally be further suitably humanized, again as described herein.

TABLE A-9
Representative amino acid sequences for Nanobodies of the KERE, GLEW and P, R, S 103 group.
The CDR's are indicated with XXXXX

| | | |
|---|---|---|
| KERE sequence no. 1 | SEQ ID NO: 1 | EVQLVESGGGLVQPGGSLRLSCAASGIPFSXXXXXWFRQAPGKQRDSVAXXXXXRFTI |
| | | SRDNAKNTVYLQMNSLKPEDTAVYRCYFXXXXXWGQGTQVTVSS |
| KERE sequence no. 2 | SEQ ID NO: 2 | QVKLEESGGGLVQAGGSLRLSCVGSGRTFSXXXXXWFRLAPGKEREFVAXXXXXRFTI |
| | | SRDTASNRGYLHMNNLTPEDTAVYYCAAXXXXXWGQGTQVTVSS |
| KERE sequence no. 3 | SEQ ID NO: 3 | AVQLVDSGGGLVQAGDSLKLSCALTGGAFTXXXXXWFRQTPGREREFVAXXXXXRFTI |
| | | SRDNAKNMVYLRMNSLIPEDAAVYSCAAXXXXXWGQGTLVTVSS |
| KERE sequence no. 4 | SEQ ID NO: 4 | QVQLVESGGGLVEAGGSLRLSCTASESPFRXXXXXWFRQTSGQEREFVAXXXXXRFTI |
| | | SRDDAKNTVWLHGSTLKPEDTAVYYCAAXXXXXWGQGTQVTVSS |
| KERE sequence no. 5 | SEQ ID NO: 5 | AVQLVESGGGLVQGGGSLRLACAASERIFDXXXXXWYRQGPGNERELVAXXXXXRFTI |
| | | SMDYTKQTVYLHMNSLRPEDTGLYYCKIXXXXXWGQGTQVTVSS |
| KERE sequence no. 6 | SEQ ID NO: 6 | DVKFVESGGGLVQAGGSLRLSCVASGFNFDXXXXXWFRQAPGKEREEVAXXXXXRFT |
| | | ISSEKDKNSVYLQMNSLKPEDTALYICAGXXXXXWGRGTQVTVSS |
| KERE sequence no. 7 | SEQ ID NO: 7 | QVRLAESGGGLVQSGGSLRLSCVASGSTYTXXXXXWYRQYPGKQRALVAXXXXXRFT |
| | | IARDSTKDTFCLQMNNLKPEDTAVYYCYAXXXXXWGQGTQVTVSS |
| KERE sequence no. 8 | SEQ ID NO: 8 | EVQLVESGGGLVQAGGSLRLSCAASGFTSDXXXXXWFRQAPGKPREGVSXXXXXRFT |
| | | ISTDNAKNTVHLLMNRVNAEDTALYYCAVXXXXXWGRGTRVTVSS |
| KERE sequence no. 9 | SEQ ID NO: 9 | QVQLVESGGGLVQPGGSLRLSCQASGDISTXXXXXWYRQVPGKLREFVAXXXXXRFTI |
| | | SGDNAKRAIYLQMNNLKPDDTAVYYCNRXXXXXWGQGTQVTVSP |
| KERE sequence no. 10 | SEQ ID NO: 10 | QVPVVESGGGLVQAGDSLRLFCAVPSFTSTXXXXXWFRQAPGKEREFVAXXXXXRFTI |
| | | SRNATKNTLTLRMDSLKPEDTAVYYCAAXXXXXWGQGTQVTVSS |
| KERE sequence no. 11 | SEQ ID NO: 11 | EVQLVESGGGLVQAGDSLRLFCTVSGGTASXXXXXWFRQAPGEKREFVAXXXXXRFTI |
| | | ARENAGNMVYLQMNNLKPDDTALYTCAAXXXXXWGRGTQVTVSS |
| KERE sequence no. 12 | SEQ ID NO: 12 | AVQLVESGGDSVQPGDSQTLSCAASGRTNSXXXXXWFRQAPGKERVFLAXXXXXRFT |
| | | ISRDSAKNMMYLQMNNLKPQDTAVYYCAAXXXXXWGQGTQVTVSS |
| KERE sequence no. 13 | SEQ ID NO: 13 | AVQLVESGGGLVQAGGSLRLSCVVSGLTSSXXXXXWFRQTPWQERDFVAXXXXXRFT |
| | | ISRDNYKDTVLLEMNFLKPEDTAIYYCAAXXXXXWGQGTQVTVSS |
| KERE sequence no. 14 | SEQ ID NO: 14 | AVQLVESGGGLVQAGASLRLSCATSTRTLDXXXXXWFRQAPGRDREFVAXXXXXRFT |
| | | VSRDSAENTVALQMNSLKPEDTAVYYCAAXXXXXWGQGTRVTVSS |
| KERE sequence no. 15 | SEQ ID NO: 15 | QVQLVESGGGLVQPGGSLRLSCTVSRLTAHXXXXXWFRQAPGKEREAVSXXXXXRFTI |
| | | SRDYAGNTAFLQMDSLKPEDTGVYYCATXXXXXWGQGTQVTVSS |
| KERE sequence no. 16 | SEQ ID NO: 16 | EVQLVESGGELVQAGGSLKLSCTASGRNFVXXXXXWFRRAPGKEREFVAXXXXXRFT |
| | | VSRDNGKNTAYLRMNSLKPEDTADYYCAVXXXXXLGSGTQVTVSS |
| GLEW sequence no. 1 | SEQ ID NO: 17 | AVQLVESGGGLVQPGGSLRLSCAASGFTFSXXXXXWVRQAPGKVLEWVSXXXXXRFT |
| | | ISRDNAKNTLYLQMNSLKPEDTAVYYCVKXXXXXGSQGTQVTVSS |
| GLEW sequence no. 2 | SEQ ID NO: 18 | EVQLVESGGGLVQPGGSLRLSCVCVSSGCTXXXXXWVRQAPGKAEEWVSXXXXXRF |
| | | KISRDNAKKTLYLQMNSLGPEDTAMYYCQRXXXXXRGQGTQVTVSS |
| GLEW sequence no. 3 | SEQ ID NO: 19 | EVQLVESGGGLALPGGSLTLSCVFSGSTFSXXXXXWVRHTPGKAEEWVSXXXXXRFTI |
| | | SRDNAKNTLYLEMNSLSPEDTAMYYCGRXXXXXRSKGIQVTVSS |
| P, R, S 103 sequence no. 1 | SEQ ID NO: 20 | AVQLVESGGGLVQAGGSLRLSCAASGRTFSXXXXXWFRQAPGKEREFVAXXXXXRFTI |
| | | SRDNAKNTVYLQMNSLKPEDTAVYYCAAXXXXXRGQGTQVTVSS |
| P, R, S 103 sequence no. 2 | SEQ ID NO: 21 | DVQLVESGGDLVQPGGSLRLSCAASGFSFDXXXXXWLRQTPGKGLEWVGXXXXXRFT |
| | | ISRDNAKNMLYLHLNNLKSEDTAVYYCRRXXXXXLGQGTQVTVSS |
| P, R, S 103 sequence no. 3 | SEQ ID NO: 22 | EVQLVESGGGLVQPGGSLRLSCVCVSSGCTXXXXXWVRQAPGKAEEWVSXXXXXRF |
| | | KISRDNAKKTLYLQMNSLGPEDTAMYYCQRXXXXXRGQGTQVTVSS |

[0606] In particular, a Nanobody of the invention of the KERE group can be an amino acid sequence with the (general) structure

FR1-CDR1-FR2-CDR2-FR3-CDR3-FR4

in which:
[0607] i) the amino acid residue at position 45 according to the Kabat numbering is a charged amino acid (as defined herein) or a cysteine residue, and position 44 is preferably an E;
   and in which:
[0608] ii) FR1 is an amino acid sequence that has at least 80% amino acid identity with at least one of the following amino acid sequences:

TABLE A-10
Representative FW1 sequences for Nanobodies of the KERE-group.

| | | |
|---|---|---|
| KERE FW1 sequence no. 1 | SEQ ID NO: 23 | QVQRVESGGGLVQAGGSLRLSCAASGRTSS |
| KERE FW1 sequence no. 2 | SEQ ID NO: 24 | QVQLVESGGGLVQTGDSLSLSCSASGRTFS |
| KERE FW1 sequence no. 3 | SEQ ID NO: 25 | QVKLEESGGGLVQAGDSLRLSCAATGRAFG |
| KERE FW1 sequence no. 4 | SEQ ID NO: 26 | AVQLVESGGGLVQPGESLGLSCVASGRDFV |
| KERE FW1 sequence no. 5 | SEQ ID NO: 27 | EVQLVESGGGLVQAGGSLRLSCEVLGRTAG |
| KERE FW1 sequence no. 6 | SEQ ID NO: 28 | QVQLVESGGGWVQPGGSLRLSCAASETILS |
| KERE FW1 sequence no. 7 | SEQ ID NO: 29 | QVQLVESGGGTVQPGGSLNLSCVASGNTFN |
| KERE FW1 sequence no. 8 | SEQ ID NO: 30 | EVQLVESGGGLAQPGGSLQLSCSAPGFTLD |
| KERE FW1 sequence no. 9 | SEQ ID NO: 31 | AQELEESGGGLVQAGGSLRLSCAASGRTFN |

and in which:
[0609] iii) FR2 is an amino acid sequence that has at least 80% amino acid identity with at least one of the following amino acid sequences:

TABLE A-l1
Representative FW2 sequences for Nanobodies
of the KERE-group.

| | | |
|---|---|---|
| KERE FW2 | SEQ ID NO: 41 | WFRQAPGKEREFVA |
| sequence no. 1 | | |
| KERE FW2 | SEQ ID NO: 42 | WFRQTPGREREFVA |
| sequence no. 2 | | |
| KERE FW2 | SEQ ID NO: 43 | WYRQAPGKQREMVA |
| sequence no. 3 | | |
| KERE FW2 | SEQ ID NO: 44 | WYRQGPGKQRELVA |
| sequence no. 4 | | |
| KERE FW2 | SEQ ID NO: 45 | WIRQAPGKEREGVS |
| sequence no. 5 | | |
| KERE FW2 | SEQ ID NO: 46 | WFREAPGKEREGIS |
| sequence no. 6 | | |
| KERE FW2 | SEQ ID NO: 47 | WYRQAPGKERDLVA |
| sequence no. 7 | | |
| KERE FW2 | SEQ ID NO: 48 | WFRQAPGKQREEVS |
| sequence no. 8 | | |
| KERE FW2 | SEQ ID NO: 49 | WFRQPPGKVREFVG |
| sequence no. 9 | | |

and in which:
[0610] iv) FR3 is an amino acid sequence that has at least 80% amino acid identity with at least one of the following amino acid sequences:

TABLE A-12
Representative FW3 sequences for Nanobodies of the KERE-group.

| | | |
|---|---|---|
| KERE FW3 sequence no. 1 | SEQ ID NO: 50 | RFTISRDNAKNTVYLQMNSLKPEDTAVYRCYF |
| KERE FW3 sequence no. 2 | SEQ ID NO: 51 | RFAISRDNNKNTGYLQMNSLEPEDTAVYYCAA |
| KERE FW3 sequence no. 3 | SEQ ID NO: 52 | RFTVARNNAKNTVNLEMNSLKPEDTAVYYCAA |
| KERE FW3 sequence no. 4 | SEQ ID NO: 53 | RFTISRDIAKNTVDLLMNNLEPEDTAVYYCAA |
| KERE FW3 sequence no. 5 | SEQ ID NO: 54 | RLTISRDNAVDTMYLQMNSLKPEDTAVYYCAA |
| KERE FW3 sequence no. 6 | SEQ ID NO: 55 | RFTISRDNAKNTVYLQMDNVKPEDTAIYYCAA |
| KERE FW3 sequence no. 7 | SEQ ID NO: 56 | RFTISKDSGKNTVYLQMTSLKPEDTAVYYCAT |
| KERE FW3 sequence no. 8 | SEQ ID NO: 57 | RFTISRDSAKNMMYLQMNNLKPQDTAVYYCAA |
| KERE FW3 sequence no. 9 | SEQ ID NO: 58 | RFTISRENDKSTVYLQLNSLKPEDTAVYYCAA |
| KERE FW3 sequence no. 10 | SEQ ID NO: 59 | RFTISRDYAGNTAYLQMNSLKPEDTGVYYCAT |

and in which:
[0611] v) FR4 is an amino acid sequence that has at least 80% amino acid identity with at least one of the following amino acid sequences:

TABLE A-13
Representative FW4 sequences for Nanobodies
of the KERE-group.

| | | |
|---|---|---|
| KERE FW4 sequence no. 1 | SEQ ID NO: 60 | WGQGTQVTVSS |
| KERE FW4 sequence no. 2 | SEQ ID NO: 61 | WGKGTLVTVSS |
| KERE FW4 sequence no. 3 | SEQ ID NO: 62 | RGQGTRVTVSS |
| KERE FW4 sequence no. 4 | SEQ ID NO: 63 | WGLGTQVTISS |

and in which:
[0612] vi) CDR1, CDR2 and CDR3 are as defined herein, and are preferably as defined according to one of the preferred aspects herein, and are more preferably as defined according to one of the more preferred aspects herein.

[0613] In the above Nanobodies, one or more of the further Hallmark residues are preferably as described herein (for example, when they are V_{HH} sequences or partially humanized Nanobodies).

[0614] Also, the above Nanobodies may for example be V_{HH} sequences or may be humanized Nanobodies. When the above Nanobody sequences are V_{HH} sequences, they may be suitably humanized, as further described herein. When the Nanobodies are partially humanized Nanobodies, they may optionally be further suitably humanized, again as described herein.

[0615] With regard to framework 1, it will be clear to the skilled person that, when an amino acid sequence as outlined above is generated by expression of a nucleotide sequence, the first four amino acid sequences (i.e. amino acid residues 1-4 according to the Kabat numbering) may often be determined by the primer(s) that have been used to generate said nucleic acid. Thus, for determining the degree of amino acid identity, the first four amino acid residues are preferably disregarded.

[0616] Also, with regard to framework 1, and although amino acid positions 27 to 30 are according to the Kabat numbering considered to be part of the framework regions (and not the CDR's), it has been found by analysis of a database of more than 1000 V_{HH} sequences that the positions 27 to 30 have a variability (expressed in terms of V_{HH} entropy and V_{HH} variability—see Tables A-5 to A-8) that is much greater than the variability on positions 1 to 26. Because of this, for determining the degree of amino acid identity, the amino acid residues at positions 27 to 30 are preferably also disregarded.

[0617] In view of this, a Nanobody of the KERE class may be an amino acid sequence that is comprised of four framework regions/sequences interrupted by three complementarity determining regions/sequences, in which:
[0618] i) the amino acid residue at position 45 according to the Kabat numbering is a charged amino acid (as defined herein) or a cysteine residue, and position 44 is preferably an E;
   and in which:
[0619] ii) FR1 is an amino acid sequence that, on positions 5 to 26 of the Kabat numbering, has at least 80% amino acid identity with at least one of the following amino acid sequences:

TABLE A-14

Representative FW1 sequences (amino acid residues 5 to 26)
for Nanobodies of the KERE-group.

| | | |
|---|---|---|
| KERE FW1 sequence no. 10 | SEQ ID NO: 32 | VESGGGLVQPGGSLRLSCAASG |
| KERE FW1 sequence no. 11 | SEQ ID NO: 33 | VDSGGGLVQAGDSLKLSCALTG |
| KERE FW1 sequence no. 12 | SEQ ID NO: 34 | VDSGGGLVQAGDSLRLSCAASG |
| KERE FW1 sequence no. 13 | SEQ ID NO: 35 | VDSGGGLVEAGGSLRLSCQVSE |
| KERE FW1 sequence no. 14 | SEQ ID NO: 36 | QDSGGGSVQAGGSLKLSCAASG |
| KERE FW1 sequence no. 15 | SEQ ID NO: 37 | VQSGGRLVQAGDSLRLSCAASE |
| KERE FW1 sequence no. 16 | SEQ ID NO: 38 | VESGGTLVQSGDSLKLSCASST |
| KERE FW1 sequence no. 17 | SEQ ID NO: 39 | MESGGDSVQSGGSLTLSCVASG |
| KERE FW1 sequence no. 18 | SEQ ID NO: 40 | QASGGGLVQAGGSLRLSCSASV |

and in which:
[0620] iii) FR2, FR3 and FR4 are as mentioned herein for FR2, FR3 and FR4 of Nanobodies of the KERE-class;
   and in which:
[0621] iv) CDR1, CDR2 and CDR3 are as defined herein, and are preferably as defined according to one of the preferred aspects herein, and are more preferably as defined according to one of the more preferred aspects herein.

[0622] The above Nanobodies may for example be V_{HH} sequences or may be humanized Nanobodies. When the above Nanobody sequences are V_{HH} sequences, they may be suitably humanized, as further described herein. When the Nanobodies are partially humanized Nanobodies, they may optionally be further suitably humanized, again as described herein.

[0623] A Nanobody of the GLEW class may be an amino acid sequence that is comprised of four framework regions/sequences interrupted by three complementarity determining regions/sequences, in which
[0624] i) preferably, when the Nanobody of the GLEW-class is a non-humanized Nanobody, the amino acid residue in position 108 is Q;
[0625] ii) FR1 is an amino acid sequence that has at least 80% amino acid identity with at least one of the following amino acid sequences:

TABLE A-15
Representative FW1 sequences for Nanobodies of the GLEW-group.

| | | |
|---|---|---|
| GLEW FW1 sequence no. 1 | SEQ ID NO: 64 | QVQLVESGGGLVQPGGSLRLSCAASGFTFS |
| GLEW FW1 sequence no. 2 | SEQ ID NO: 65 | EVHLVESGGGLVRPGGSLRLSCAAFGFIFK |
| GLEW FW1 sequence no. 3 | SEQ ID NO: 66 | QVKLEESGGGLAQPGGSLRLSCVASGFTFS |
| GLEW FW1 sequence no. 4 | SEQ ID NO: 67 | EVQLVESGGGLVQPGGSLRLSCVCVSSGCT |
| GLEW FW1 sequence no. 5 | SEQ ID NO: 68 | EVQLVESGGGLALPGGSLTLSCVFSGSTFS |

and in which:
[0626] iii) FR2 is an amino acid sequence that has at least 80% amino acid identity with at least one of the following amino acid sequences:

TABLE A-16
Representative FW2 sequences for Nanobodies of
the GLEW-group.

| | | |
|---|---|---|
| GLEW FW2 | SEQ ID NO: 72 | WVRQAPGKVLEWVS |
| sequence no. 1 | | |
| GLEW FW2 | SEQ ID NO: 73 | WVRRPPGKGLEWVS |
| sequence no. 2 | | |
| GLEW FW2 | SEQ ID NO: 74 | WVRQAPGMGLEWVS |
| sequence no. 3 | | |
| GLEW FW2 | SEQ ID NO: 75 | WVRQAPGKEPEWVS |
| sequence no. 4 | | |
| GLEW FW2 | SEQ ID NO: 76 | WVRQAPGKDQEWVS |
| sequence no. 5 | | |
| GLEW FW2 | SEQ ID NO: 77 | WVRQAPGKAEEWVS |
| sequence no. 6 | | |
| GLEW FW2 | SEQ ID NO: 78 | WVRQAPGKGLEWVA |
| sequence no. 7 | | |
| GLEW FW2 | SEQ ID NO: 79 | WVRQAPGRATEWVS |
| sequence no. 8 | | |

and in which:
[0627] iv) FR3 is an amino acid sequence that has at least 80% amino acid identity with at least one of the following amino acid sequences:

TABLE A-17
Representative FW3 sequences for Nanobodies of the GLEW-group.

| | | |
|---|---|---|
| GLEW FW3 sequence no. 1 | SEQ ID NO: 80 | RFTISRDNAKNTLYLQMNSLKPEDTAVYYCVK |
| GLEW FW3 sequence no. 2 | SEQ ID NO: 81 | RFTISRDNARNTLYLQMDSLIPEDTALYYCAR |
| GLEW FW3 sequence no. 3 | SEQ ID NO: 82 | RFTSSRDNAKSTLYLQMNDLKPEDTALYYCAR |
| GLEW FW3 sequence no. 4 | SEQ ID NO: 83 | RFIISRDNAKNTLYLQMNSLGPEDTAMYYCQR |
| GLEW FW3 sequence no. 5 | SEQ ID NO: 84 | RFTASRDNAKNTLYLQMNSLKSEDTARYYCAR |
| GLEW FW3 sequence no. 6 | SEQ ID NO: 85 | RFTISRDNAKNTLYLQMDDLQSEDTAMYYCGR |

and in which:
[0628] v) FR4 is an amino acid sequence that has at least 80% amino acid identity with at least one of the following amino acid sequences:

TABLE A-18
Representative FW4 sequences for Nanobodies of
the GLEW-group.

| | | |
|---|---|---|
| GLEW FW4 sequence no. 1 | SEQ ID NO: 86 | GSQGTQVTVSS |
| GLEW FW4 sequence no. 2 | SEQ ID NO: 87 | LRGGTQVTVSS |
| GLEW FW4 sequence no. 3 | SEQ ID NO: 88 | RGQGTLVTVSS |
| GLEW FW4 sequence no. 4 | SEQ ID NO: 89 | RSRGIQVTVSS |
| GLEW FW4 sequence no. 5 | SEQ ID NO: 90 | WGKGTQVTVSS |
| GLEW FW4 sequence no. 6 | SEQ ID NO: 91 | WGQGTQVTVSS |

and in which:
[0629] vi) CDR1, CDR2 and CDR3 are as defined herein, and are preferably as defined according to one of the preferred aspects herein, and are more preferably as defined according to one of the more preferred aspects herein.

[0630] In the above Nanobodies, one or more of the further Hallmark residues are preferably as described herein (for example, when they are V_{HH} sequences or partially humanized Nanobodies).

[0631] With regard to framework 1, it will again be clear to the skilled person that, for determining the degree of amino acid identity, the amino acid residues on positions 1 to 4 and 27 to 30 are preferably disregarded.

[0632] In view of this, a Nanobody of the GLEW class may be an amino acid sequence that is comprised of four framework regions/sequences interrupted by three complementarity determining regions/sequences, in which:
[0633] i) preferably, when the Nanobody of the GLEW-class is a non-humanized Nanobody, the amino acid residue in position 108 is Q;
   and in which:
[0634] ii) FR1 is an amino acid sequence that, on positions 5 to 26 of the Kabat numbering, has at least 80% amino acid identity with at least one of the following amino acid sequences:

TABLE A-19

Representative FW1 sequences (amino acid residues 5 to 26)
for Nanobodies of the KERE-group.

| | | |
|---|---|---|
| GLEW FW1 sequence no. 6 | SEQ ID NO: 69 | VESGGGLVQPGGSLRLSCAASG |
| GLEW FW1 sequence no. 7 | SEQ ID NO: 70 | EESGGGLAQPGGSLRLSCVASG |
| GLEW FW1 sequence no. 8 | SEQ ID NO: 71 | VESGGGLALPGGSLTLSCVFSG |

and in which:
[0635] iii) FR2, FR3 and FR4 are as mentioned herein for FR2, FR3 and FR4 of Nanobodies of the GLEW-class;
   and in which:
[0636] iv) CDR1, CDR2 and CDR3 are as defined herein, and are preferably as defined according to one of the preferred aspects herein, and are more preferably as defined according to one of the more preferred aspects herein.

[0637] The above Nanobodies may for example be V_{HH} sequences or may be humanized Nanobodies. When the above Nanobody sequences are V_{HH} sequences, they may be suitably humanized, as further described herein. When the Nanobodies are partially humanized Nanobodies, they may optionally be further suitably humanized, again as described herein. In the above Nanobodies, one or more of the further Hallmark residues are preferably as described herein (for example, when they are V_{HH} sequences or partially humanized Nanobodies).

[0638] A Nanobody of the P, R, S 103 class may be an amino acid sequence that is comprised of four framework regions/sequences interrupted by three complementarity determining regions/sequences, in which
[0639] i) the amino acid residue at position 103 according to the Kabat numbering is different from W;
   and in which:
[0640] ii) preferably the amino acid residue at position 103 according to the Kabat numbering is P, R or S, and more preferably R;
   and in which:
[0641] iii) FR1 is an amino acid sequence that has at least 80% amino acid identity with at least one of the following amino acid sequences:

TABLE A-20
Representative FW1 sequences for Nanobodies of the P, R, S 103-group.

| | | |
|---|---|---|
| P, R, S 103 FW1 sequence no. 1 | SEQ ID NO: 92 | AVQLVESGGGLVQAGGSLRLSCAASGRTFS |
| P, R, S 103 FW1 sequence no. 2 | SEQ ID NO: 93 | QVQLQESGGGMVQPGGSLRLSCAASGFDFG |
| P, R, S 103 FW1 sequence no. 3 | SEQ ID NO: 94 | EVHLVESGGGLVRPGGSLRLSCAAFGFIFK |
| P, R, S 103 FW1 sequence no. 4 | SEQ ID NO: 95 | QVQLAESGGGLVQPGGSLKLSCAASRTIVS |
| P, R, S 103 FW1 sequence no. 5 | SEQ ID NO: 96 | QEHLVESGGGLVDIGGSLRLSCAASERIFS |
| P, R, S 103 FW1 sequence no. 6 | SEQ ID NO: 97 | QVKLEESGGGLAQPGGSLRLSCVASGFTFS |
| P, R, S 103 FW1 sequence no. 7 | SEQ ID NO: 98 | EVQLVESGGGLVQPGGSLRLSCVCVSSGCT |
| P, R, S 103 FW1 sequence no. 8 | SEQ ID NO: 99 | EVQLVESGGGLALPGGSLTLSCVFSGSTFS |

and in which
[0642] iv) FR2 is an amino acid sequence that has at least 80% amino acid identity with at least one of the following amino acid sequences:

TABLE A-21
Representative FW2 sequences for Nanobodies of
the P, R, S 103-group.

| | | |
|---|---|---|
| P, R, S 103 FW2 | SEQ ID NO: 102 | WFRQAPGKEREFVA |
| sequence no. 1 | | |
| P, R, S 103 FW2 | SEQ ID NO: 103 | WVRQAPGKVLEWVS |
| sequence no. 2 | | |
| P, R, S 103 FW2 | SEQ ID NO: 104 | WVRRPPGKGLEWVS |
| sequence no. 3 | | |
| P, R, S 103 FW2 | SEQ ID NO: 105 | WIRQAPGKEREGVS |
| sequence no. 4 | | |
| P, R, S 103 FW2 | SEQ ID NO: 106 | WVRQYPGKEPEWVS |
| sequence no. 5 | | |
| P, R, S 103 FW2 | SEQ ID NO: 107 | WFRQPPGKEHEFVA |
| sequence no. 6 | | |
| P, R, S 103 FW2 | SEQ ID NO: 108 | WYRQAPGKRTELVA |
| sequence no. 7 | | |
| P, R, S 103 FW2 | SEQ ID NO: 109 | WLRQAPGQGLEWVS |
| sequence no. 8 | | |
| P, R, S 103 FW2 | SEQ ID NO: 110 | WLRQTPGKGLEWVG |
| sequence no. 9 | | |
| P, R, S 103 FW2 | SEQ ID NO: 111 | WVRQAPGKAEEFVS |
| sequence no. 10 | | |

and in which:
[0643] v) FR3 is an amino acid sequence that has at least 80% amino acid identity with at least one of the following amino acid sequences:

TABLE A-22
Representative FW3 sequences for Nanobodies of the P, R, S 103-group.

| | | |
|---|---|---|
| P, R, S 103 FW3 sequence no. 1 | SEQ ID NO: 112 | RFTISRDNAKNTVYLQMNSLKPEDTAVYYCAA |
| P, R, S 103 FW3 sequence no. 2 | SEQ ID NO: 113 | RFTISRDNARNTLYLQMDSLIPEDTALYYCAR |
| P, R, S 103 FW3 sequence no. 3 | SEQ ID NO: 114 | RFTISRDNAKNEMYLQMNNLKTEDTGVYWCGA |
| P, R, S 103 FW3 sequence no. 4 | SEQ ID NO: 115 | RFTISSDSNRNMIYLQMNNLKPEDTAVYYCAA |
| P, R, S 103 FW3 sequence no. 5 | SEQ ID NO: 116 | RFTISRDNAKNMLYLHLNNLKSEDTAVYYCRR |
| P, R, S 103 FW3 sequence no. 6 | SEQ ID NO: 117 | RFTISRDNAKKTVYLRLNSLNPEDTAVYSCNL |
| P, R, S 103 FW3 sequence no. 7 | SEQ ID NO: 118 | RFKISRDNAKKTLYLQMNSLGPEDTAMYYCQR |
| P, R, S 103 FW3 sequence no. 8 | SEQ ID NO: 119 | RFTVSRDNGKNTAYLRMNSLKPEDTADYYCAV |

and in which:
[0644] vi) FR4 is an amino acid sequence that has at least 80% amino acid identity with at least one of the following amino acid sequences:

TABLE A-23

Representative FW4 sequences for Nanobodies of the P, R, S
103-group.

| | | |
|---|---|---|
| P, R, S 103 FW4 sequence no. 1 | SEQ ID NO: 120 | RGQGTQVTVSS |
| P, R, S 103 FW4 sequence no. 2 | SEQ ID NO: 121 | LRGGTQVTVSS |
| P, R, S 103 FW4 sequence no. 3 | SEQ ID NO: 122 | GNKGTLVTVSS |
| P, R, S 103 FW4 sequence no. 4 | SEQ ID NO: 123 | SSPGTQVTVSS |
| P, R, S 103 FW4 sequence no. 5 | SEQ ID NO: 124 | SSQGTLVTVSS |
| P, R, S 103 FW4 sequence no. 6 | SEQ ID NO: 125 | RSRGIQVTVSS |

and in which:
[0645] vii) CDR1, CDR2 and CDR3 are as defined herein, and are preferably as defined according to one of the preferred aspects herein, and are more preferably as defined according to one of the more preferred aspects herein.

[0646] In the above Nanobodies, one or more of the further Hallmark residues are preferably as described herein (for example, when they are V_{HH} sequences or partially humanized Nanobodies).

[0647] With regard to framework 1, it will again be clear to the skilled person that, for determining the degree of amino acid identity, the amino acid residues on positions 1 to 4 and 27 to 30 are preferably disregarded.

[0648] In view of this, a Nanobody of the P,R,S 103 class may be an amino acid sequence that is comprised of four framework regions/sequences interrupted by three complementarity determining regions/sequences, in which:
[0649] i) the amino acid residue at position 103 according to the Kabat numbering is different from W;
   and in which:
[0650] ii) preferably the amino acid residue at position 103 according to the Kabat numbering is P, R or S, and more preferably R;
   and in which:
[0651] iii) FR1 is an amino acid sequence that, on positions 5 to 26 of the Kabat numbering, has at least 80% amino acid identity with at least one of the following amino acid sequences:

TABLE A-24

Representative FW1 sequences (amino acid residues 5 to 26) for
Nanobodies of the P, R, S 103-group.

| | | |
|---|---|---|
| P, R, S 103 FW1 sequence no. 9 | SEQ ID NO: 100 | VESGGGLVQAGGSLRLSCAASG |
| P, R, S 103 FW1 sequence no. 10 | SEQ ID NO: 101 | AESGGGLVQPGGSLKLSCAASR |

and in which:
[0652] iv) FR2, FR3 and FR4 are as mentioned herein for FR2, FR3 and FR4 of Nanobodies of the P,R,S 103 class;
   and in which:
[0653] v) CDR1, CDR2 and CDR3 are as defined herein, and are preferably as defined according to one of the preferred aspects herein, and are more preferably as defined according to one of the more preferred aspects herein.

[0654] The above Nanobodies may for example be V_{HH} sequences or may be humanized Nanobodies. When the above Nanobody sequences are V_{HH} sequences, they may be suitably humanized, as further described herein. When the Nanobodies are partially humanized Nanobodies, they may optionally be further suitably humanized, again as described herein.

[0655] In the above Nanobodies, one or more of the further Hallmark residues are preferably as described herein (for example, when they are V_{HH} sequences or partially humanized Nanobodies).

[0656] In another preferred, but non-limiting aspect, the invention relates to a Nanobody as described above, in which the CDR sequences have at least 70% amino acid identity, preferably at least 80% amino acid identity, more preferably at least 90% amino acid identity, such as 95% amino acid identity or more or even essentially 100% amino acid identity with the CDR sequences of at least one of the amino acid sequences of SEQ ID NO's: 560-621. This degree of amino acid identity can for example be determined by determining the degree of amino acid identity (in a manner described herein) between said Nanobody and one or more of the sequences of SEQ ID NO's: 560-621, in which the amino acid residues that form the framework regions are disregarded. Such Nanobodies can be as further described herein.

[0657] As already mentioned herein, another preferred but non-limiting aspect of the invention relates to a Nanobody with an amino acid sequence that is chosen from the group consisting of SEQ ID NO's: 560-621 or from the group consisting of from amino acid sequences that have more than 80%, preferably more than 90%, more preferably more than 95%, such as 99% or more sequence identity (as defined herein) with at least one of the amino acid sequences of SEQ ID NO's: 560-621.

[0658] Also, in the above Nanobodies:
[0659] i) any amino acid substitution (when it is not a humanizing substitution as defined herein) is preferably, and compared to the corresponding amino acid sequence of SEQ ID NO's: 560-621, a conservative amino acid substitution, (as defined herein);
   and/or:
[0660] ii) its amino acid sequence preferably contains either only amino acid substitutions, or otherwise preferably no more than 5, preferably no more than 3, and more preferably only 1 or 2 amino acid deletions or insertions, compared to the corresponding amino acid sequence of SEQ ID NO's: 560-621;
   and/or
[0661] iii) the CDR's may be CDR's that are derived by means of affinity maturation, for example starting from the CDR's of to the corresponding amino acid sequence of SEQ ID NO's: 560-621.

[0662] Preferably, the CDR sequences and FR sequences in the Nanobodies of the invention are such that the Nanobodies of the invention (and polypeptides of the invention comprising the same):
[0663] bind to RANK-L with a dissociation constant (K_{D}) of 10⁻⁵ to 10⁻¹² moles/liter or less, and preferably 10⁻⁷ to 10⁻¹² moles/liter or less and more preferably 10⁻⁸ to 10⁻¹² moles/liter (i.e. with an association constant (K_{A}) of 10⁵ to 10¹² liter/moles or more, and preferably 10⁷ to 10¹² liter/moles or more and more preferably 10⁸ to 10¹² liter/moles);
   and/or such that they:
[0664] bind to RANK-L with a kₒₙ-rate of between 10² M⁻¹s⁻¹ to about 10⁷ M⁻¹s⁻¹, preferably between 10³ M⁻¹s⁻¹ and 10⁷ M⁻¹s⁻¹, more preferably between 10⁴ M⁻¹s⁻¹ and 10⁷ M⁻¹s⁻¹, such as between 10⁵ M⁻¹s⁻¹ and 10⁷ M⁻¹s⁻¹;
   and/or such that they:
[0665] bind to RANK-L with a k_{off} rate between 1 s⁻¹ (t_{1/2}=0.69 s) and 10⁻⁶ s⁻¹ (providing a near irreversible complex with a t_{1/2} of multiple days), preferably between 10⁻² s⁻¹ and 10⁻⁶ s⁻¹, more preferably between 10⁻³ s⁻¹ and 10⁻⁶ s⁻¹, such as between 10⁻⁴ s⁻¹ and 10⁻⁶ s⁻¹.

[0666] Preferably, CDR sequences and FR sequences present in the Nanobodies of the invention are such that the Nanobodies of the invention will bind to RANK-L with an affinity less than 500 nM, preferably less than 200 nM, more preferably less than 10 nM, such as less than 500 pM.

[0667] According to one non-limiting aspect of the invention, a Nanobody may be as defined herein, but with the proviso that it has at least “one amino acid difference” (as defined herein) in at least one of the framework regions compared to the corresponding framework region of a naturally occurring human V_{H} domain, and in particular compared to the corresponding framework region of DP-47. More specifically, according to one non-limiting aspect of the invention, a Nanobody may be as defined herein, but with the proviso that it has at least “one amino acid difference” (as defined herein) at least one of the Hallmark residues (including those at positions 108, 103 and/or 45) compared to the corresponding framework region of a naturally occurring human V_{H} domain, and in particular compared to the corresponding framework region of DP-47. Usually, a Nanobody will have at least one such amino acid difference with a naturally occurring V_{H} domain in at least one of FR2 and/or FR4, and in particular at least one of the Hallmark residues in FR2 and/or FR4 (again, including those at positions 108, 103 and/or 45).

[0668] Also, a humanized Nanobody of the invention may be as defined herein, but with the proviso that it has at least “one amino acid difference” (as defined herein) in at least one of the framework regions compared to the corresponding framework region of a naturally occurring V_{HH} domain. More specifically, according to one non-limiting aspect of the invention, a humanized Nanobody may be as defined herein, but with the proviso that it has at least “one amino acid difference” (as defined herein) at least one of the Hallmark residues (including those at positions 108, 103 and/or 45) compared to the corresponding framework region of a naturally occurring V_{HH} domain. Usually, a humanized Nanobody will have at least one such amino acid difference with a naturally occurring V_{HH} domain in at least one of FR2 and/or FR4, and in particular at least one of the Hallmark residues in FR2 and/or FR4 (again, including those at positions 108, 103 and/or 45).

[0669] As will be clear from the disclosure herein, it is also within the scope of the invention to use natural or synthetic analogs, mutants, variants, alleles, homologs and orthologs (herein collectively referred to as “analogs”) of the Nanobodies of the invention as defined herein, and in particular analogs of the Nanobodies of SEQ ID NO's: 560-621. Thus, according to one aspect of the invention, the term “Nanobody of the invention” in its broadest sense also covers such analogs.

[0670] Generally, in such analogs, one or more amino acid residues may have been replaced, deleted and/or added, compared to the Nanobodies of the invention as defined herein. Such substitutions, insertions or deletions may be made in one or more of the framework regions and/or in one or more of the CDR's. When such substitutions, insertions or deletions are made in one or more of the framework regions, they may be made at one or more of the Hallmark residues and/or at one or more of the other positions in the framework residues, although substitutions, insertions or deletions at the Hallmark residues are generally less preferred (unless these are suitable humanizing substitutions as described herein).

[0671] By means of non-limiting examples, a substitution may for example be a conservative substitution (as described herein) and/or an amino acid residue may be replaced by another amino acid residue that naturally occurs at the same position in another V_{HH} domain (see Tables A-5 to A-8 for some non-limiting examples of such substitutions), although the invention is generally not limited thereto. Thus, any one or more substitutions, deletions or insertions, or any combination thereof, that either improve the properties of the Nanobody of the invention or that at least do not detract too much from the desired properties or from the balance or combination of desired properties of the Nanobody of the invention (i.e. to the extent that the Nanobody is no longer suited for its intended use) are included within the scope of the invention. A skilled person will generally be able to determine and select suitable substitutions, deletions or insertions, or suitable combinations of thereof, based on the disclosure herein and optionally after a limited degree of routine experimentation, which may for example involve introducing a limited number of possible substitutions and determining their influence on the properties of the Nanobodies thus obtained.

[0672] For example, and depending on the host organism used to express the Nanobody or polypeptide of the invention, such deletions and/or substitutions may be designed in such a way that one or more sites for post-translational modification (such as one or more glycosylation sites) are removed, as will be within the ability of the person skilled in the art. Alternatively, substitutions or insertions may be designed so as to introduce one or more sites for attachment of functional groups (as described herein), for example to allow site-specific pegylation (again as described herein).

[0673] As can be seen from the data on the V_{HH} entropy and V_{HH} variability given in Tables A-5 to A-8 above, some amino acid residues in the framework regions are more conserved than others. Generally, although the invention in its broadest sense is not limited thereto, any substitutions, deletions or insertions are preferably made at positions that are less conserved. Also, generally, amino acid substitutions are preferred over amino acid deletions or insertions.

[0674] The analogs are preferably such that they can bind to RANK-L with an affinity (suitably measured and/or expressed as a K_{D}-value (actual or apparent), a K_{A}-value (actual or apparent), a kₒₙ-rate and/or a k_{off}-rate, or alternatively as an IC₅₀ value, as further described herein) that is as defined herein for the Nanobodies of the invention.

[0675] The analogs are preferably also such that they retain the favourable properties the Nanobodies, as described herein.

[0676] Also, according to one preferred aspect, the analogs have a degree of sequence identity of at least 70%, preferably at least 80%, more preferably at least 90%, such as at least 95% or 99% or more; and/or preferably have at most 20, preferably at most 10, even more preferably at most 5, such as 4, 3, 2 or only 1 amino acid difference (as defined herein), with one of the Nanobodies of SEQ ID NOs: 560-621.

[0677] Also, the framework sequences and CDR's of the analogs are preferably such that they are in accordance with the preferred aspects defined herein. More generally, as described herein, the analogs will have (a) a Q at position 108; and/or (b) a charged amino acid or a cysteine residue at position 45 and preferably an E at position 44, and more preferably E at position 44 and R at position 45; and/or (c) P, R or S at position 103.

[0678] One preferred class of analogs of the Nanobodies of the invention comprise Nanobodies that have been humanized (i.e. compared to the sequence of a naturally occurring Nanobody of the invention). As mentioned in the background art cited herein, such humanization generally involves replacing one or more amino acid residues in the sequence of a naturally occurring V_{HH} with the amino acid residues that occur at the same position in a human V_{H} domain, such as a human V_{H}3 domain. Examples of possible humanizing substitutions or combinations of humanizing substitutions will be clear to the skilled person, for example from the Tables herein, from the possible humanizing substitutions mentioned in the background art cited herein, and/or from a comparison between the sequence of a Nanobody and the sequence of a naturally occurring human V_{H} domain.

[0679] The humanizing substitutions should be chosen such that the resulting humanized Nanobodies still retain the favourable properties of Nanobodies as defined herein, and more preferably such that they are as described for analogs in the preceding paragraphs. A skilled person will generally be able to determine and select suitable humanizing substitutions or suitable combinations of humanizing substitutions, based on the disclosure herein and optionally after a limited degree of routine experimentation, which may for example involve introducing a limited number of possible humanizing substitutions and determining their influence on the properties of the Nanobodies thus obtained.

[0680] Generally, as a result of humanization, the Nanobodies of the invention may become more “human-like”, while still retaining the favorable properties of the Nanobodies of the invention as described herein. As a result, such humanized Nanobodies may have several advantages, such as a reduced immunogenicity, compared to the corresponding naturally occurring V_{HH} domains. Again, based on the disclosure herein and optionally after a limited degree of routine experimentation, the skilled person will be able to select humanizing substitutions or suitable combinations of humanizing substitutions which optimize or achieve a desired or suitable balance between the favourable properties provided by the humanizing substitutions on the one hand and the favourable properties of naturally occurring V_{HH} domains on the other hand.

[0681] The Nanobodies of the invention may be suitably humanized at any framework residue(s), such as at one or more Hallmark residues (as defined herein) or at one or more other framework residues (i.e. non-Hallmark residues) or any suitable combination thereof. One preferred humanizing substitution for Nanobodies of the “P,R,S-103 group” or the “KERE group” is Q108 into L108. Nanobodies of the “GLEW class” may also be humanized by a Q108 into L108 substitution, provided at least one of the other Hallmark residues contains a camelid (camelizing) substitution (as defined herein). For example, as mentioned above, one particularly preferred class of humanized Nanobodies has GLEW or a GLEW-like sequence at positions 44-47; P, R or S (and in particular R) at position 103, and an L at position 108.

[0682] The humanized and other analogs, and nucleic acid sequences encoding the same, can be provided in any manner known per se. For example, the analogs can be obtained by providing a nucleic acid that encodes a naturally occurring V_{HH} domain, changing the codons for the one or more amino acid residues that are to be substituted into the codons for the corresponding desired amino acid residues (e.g. by site-directed mutagenesis or by PCR using suitable mismatch primers), expressing the nucleic acid/nucleotide sequence thus obtained in a suitable host or expression system; and optionally isolating and/or purifying the analog thus obtained to provide said analog in essentially isolated form (e.g. as further described herein). This can generally be performed using methods and techniques known per se, which will be clear to the skilled person, for example from the handbooks and references cited herein, the background art cited herein and/or from the further description herein. Alternatively, a nucleic acid encoding the desired analog can be synthesized in a manner known per se (for example using an automated apparatus for synthesizing nucleic acid sequences with a predefined amino acid sequence) and can then be expressed as described herein. Yet another technique may involve combining one or more naturally occurring and/or synthetic nucleic acid sequences each encoding a part of the desired analog, and then expressing the combined nucleic acid sequence as described herein. Also, the analogs can be provided using chemical synthesis of the pertinent amino acid sequence using techniques for peptide synthesis known per se, such as those mentioned herein.

[0683] In this respect, it will be also be clear to the skilled person that the Nanobodies of the invention (including their analogs) can be designed and/or prepared starting from human V_{H} sequences (i.e. amino acid sequences or the corresponding nucleotide sequences), such as for example from human V_{H}3 sequences such as DP-47, DP-51 or DP-29, i.e. by introducing one or more camelizing substitutions (i.e. changing one or more amino acid residues in the amino acid sequence of said human V_{H} domain into the amino acid residues that occur at the corresponding position in a V_{HH} domain), so as to provide the sequence of a Nanobody of the invention and/or so as to confer the favourable properties of a Nanobody to the sequence thus obtained. Again, this can generally be performed using the various methods and techniques referred to in the previous paragraph, using an amino acid sequence and/or nucleotide sequence for a human V_{H} domain as a starting point.

[0684] Some preferred, but non-limiting camelizing substitutions can be derived from Tables A-5-A-8. It will also be clear that camelizing substitutions at one or more of the Hallmark residues will generally have a greater influence on the desired properties than substitutions at one or more of the other amino acid positions, although both and any suitable combination thereof are included within the scope of the invention. For example, it is possible to introduce one or more camelizing substitutions that already confer at least some the desired properties, and then to introduce further camelizing substitutions that either further improve said properties and/or confer additional favourable properties. Again, the skilled person will generally be able to determine and select suitable camelizing substitutions or suitable combinations of camelizing substitutions, based on the disclosure herein and optionally after a limited degree of routine experimentation, which may for example involve introducing a limited number of possible camelizing substitutions and determining whether the favourable properties of Nanobodies are obtained or improved (i.e. compared to the original V_{H} domain). Generally, however, such camelizing substitutions are preferably such that the resulting an amino acid sequence at least contains (a) a Q at position 108; and/or (b) a charged amino acid or a cysteine residue at position 45 and preferably also an E at position 44, and more preferably E at position 44 and R at position 45; and/or (c) P, R or S at position 103; and optionally one or more further camelizing substitutions. More preferably, the camelizing substitutions are such that they result in a Nanobody of the invention and/or in an analog thereof (as defined herein), such as in a humanized analog and/or preferably in an analog that is as defined in the preceding paragraphs.

[0685] Other analogs and nucleic acid sequences encoding the same, can be provided, for example to improve stability of the Nanobody. During storage, Nanobodies and other types of immunoglobulins may generate certain variants as a result of:
[0686] i) oxidation event(s), occurring in typically only the “accessible” methionines wherein oxidation increases during storage in parallel with incubation temperature and time;
[0687] ii) cyclization of the first glutamic acid residue, if present, resulting in formation of pyroglutamate, and
[0688] iii) isomerization of only the “accessible” aspartic acids or asparagines in a DG, DS, NG or NS motif wherein isomerization increases during storage in parallel with incubation temperature and time.
   Analogs of variants of the Nanobodies of the invention may be generated that have improved stability profile. This can be done, for example, but without being limiting, by avoiding isomerization of Asp (D) and Asn (N), e.g. by replacing the Asp-Gly (DG), Asp-Ser (DS), Asn-Gly (NG) and Asn-Ser (NS) in the CDRs with another amino acid such as e.g. Glu (E) or Gln (Q); by avoiding oxidation of Met e.g. by replacing Met which are susceptible to forced oxidation with another amino acid such as e.g. an Ala or Thr, and/or by replacing N-terminal Glu by an alternative N-terminus, e.g. Asp. Again, the skilled person will generally be able to determine and select suitable stabilizing substitutions or suitable combinations of stabilizing substitutions, based on the disclosure herein and optionally after a limited degree of routine experimentation, which may for example involve introducing a limited number of possible stabilizing substitutions and determining whether the Nanobodies still bind RANK-L and whether the favourable properties of Nanobodies are obtained or improved (i.e. compared to the original V_{H} or V_{HH} domain). A preferred stabilized Nanobody is depicted in SEQ ID NO: 756) wherein the DS motif in CDR2 is replaced with ES resulting in the following CDR2:

| | |
|---|---|
| SITGSGGSTYYAESVKG. | (SEQ ID NO: 758) |

[0689] As will also be clear from the disclosure herein, it is also within the scope of the invention to use parts or fragments, or combinations of two or more parts or fragments, of the Nanobodies of the invention as defined herein, and in particular parts or fragments of the Nanobodies of SEQ ID NO's: 560-621. Thus, according to one aspect of the invention, the term “Nanobody of the invention” in its broadest sense also covers such parts or fragments.

[0690] Generally, such parts or fragments of the Nanobodies of the invention (including analogs thereof) have amino acid sequences in which, compared to the amino acid sequence of the corresponding full length Nanobody of the invention (or analog thereof), one or more of the amino acid residues at the N-terminal end, one or more amino acid residues at the C-terminal end, one or more contiguous internal amino acid residues, or any combination thereof, have been deleted and/or removed.

[0691] The parts or fragments are preferably such that they can bind to RANK-L with an affinity (suitably measured and/or expressed as a K_{D}-value (actual or apparent), a K_{A}-value (actual or apparent), a kₒₙ-rate and/or a k_{off}-rate, or alternatively as an IC₅₀ value, as further described herein) that is as defined herein for the Nanobodies of the invention.

[0692] Any part or fragment is preferably such that it comprises at least 10 contiguous amino acid residues, preferably at least 20 contiguous amino acid residues, more preferably at least 30 contiguous amino acid residues, such as at least 40 contiguous amino acid residues, of the amino acid sequence of the corresponding full length Nanobody of the invention.

[0693] Also, any part or fragment is such preferably that it comprises at least one of CDR1, CDR2 and/or CDR3 or at least part thereof (and in particular at least CDR3 or at least part thereof). More preferably, any part or fragment is such that it comprises at least one of the CDR's (and preferably at least CDR3 or part thereof) and at least one other CDR (i.e. CDR1 or CDR2) or at least part thereof, preferably connected by suitable framework sequence(s) or at least part thereof. More preferably, any part or fragment is such that it comprises at least one of the CDR's (and preferably at least CDR3 or part thereof) and at least part of the two remaining CDR's, again preferably connected by suitable framework sequence(s) or at least part thereof.

[0694] According to another particularly preferred, but non-limiting aspect, such a part or fragment comprises at least CDR3, such as FR3, CDR3 and FR4 of the corresponding full length Nanobody of the invention, i.e. as for example described in the International application WO 03/050531 (Lasters et al.).

[0695] As already mentioned above, it is also possible to combine two or more of such parts or fragments (i.e. from the same or different Nanobodies of the invention), i.e. to provide an analog (as defined herein) and/or to provide further parts or fragments (as defined herein) of a Nanobody of the invention. It is for example also possible to combine one or more parts or fragments of a Nanobody of the invention with one or more parts or fragments of a human V_{H} domain.

[0696] According to one preferred aspect, the parts or fragments have a degree of sequence identity of at least 50%, preferably at least 60%, more preferably at least 70%, even more preferably at least 80%, such as at least 90%, 95% or 99% or more with one of the Nanobodies of SEQ ID NOs: 560-621.

[0697] The parts and fragments, and nucleic acid sequences encoding the same, can be provided and optionally combined in any manner known per se. For example, such parts or fragments can be obtained by inserting a stop codon in a nucleic acid that encodes a full-sized Nanobody of the invention, and then expressing the nucleic acid thus obtained in a manner known per se (e.g. as described herein). Alternatively, nucleic acids encoding such parts or fragments can be obtained by suitably restricting a nucleic acid that encodes a full-sized Nanobody of the invention or by synthesizing such a nucleic acid in a manner known per se. Parts or fragments may also be provided using techniques for peptide synthesis known per se.

[0698] The invention in its broadest sense also comprises derivatives of the Nanobodies of the invention. Such derivatives can generally be obtained by modification, and in particular by chemical and/or biological (e.g. enzymatical) modification, of the Nanobodies of the invention and/or of one or more of the amino acid residues that form the Nanobodies of the invention.

[0699] Examples of such modifications, as well as examples of amino acid residues within the Nanobody sequence that can be modified in such a manner (i.e. either on the protein backbone but preferably on a side chain), methods and techniques that can be used to introduce such modifications and the potential uses and advantages of such modifications will be clear to the skilled person.

[0700] For example, such a modification may involve the introduction (e.g. by covalent linking or in an other suitable manner) of one or more functional groups, residues or moieties into or onto the Nanobody of the invention, and in particular of one or more functional groups, residues or moieties that confer one or more desired properties or functionalities to the Nanobody of the invention. Example of such functional groups will be clear to the skilled person.

[0701] For example, such modification may comprise the introduction (e.g. by covalent binding or in any other suitable manner) of one or more functional groups that increase the half-life, the solubility and/or the absorption of the Nanobody of the invention, that reduce the immunogenicity and/or the toxicity of the Nanobody of the invention, that eliminate or attenuate any undesirable side effects of the Nanobody of the invention, and/or that confer other advantageous properties to and/or reduce the undesired properties of the Nanobodies and/or polypeptides of the invention; or any combination of two or more of the foregoing. Examples of such functional groups and of techniques for introducing them will be clear to the skilled person, and can generally comprise all functional groups and techniques mentioned in the general background art cited hereinabove as well as the functional groups and techniques known per se for the modification of pharmaceutical proteins, and in particular for the modification of antibodies or antibody fragments (including ScFv's and single domain antibodies), for which reference is for example made to Remington's Pharmaceutical Sciences, 16th ed., Mack Publishing Co., Easton, Pa. (1980). Such functional groups may for example be linked directly (for example covalently) to a Nanobody of the invention, or optionally via a suitable linker or spacer, as will again be clear to the skilled person.

[0702] One of the most widely used techniques for increasing the half-life and/or reducing the immunogenicity of pharmaceutical proteins comprises attachment of a suitable pharmacologically acceptable polymer, such as poly(ethyleneglycol) (PEG) or derivatives thereof (such as methoxypoly(ethyleneglycol) or mPEG). Generally, any suitable form of pegylation can be used, such as the pegylation used in the art for antibodies and antibody fragments (including but not limited to (single) domain antibodies and ScFv's); reference is made to for example Chapman, Nat. Biotechnol., 54, 531-545 (2002); by Veronese and Harris, Adv. Drug Deliv. Rev. 54, 453-456 (2003), by Harris and Chess, Nat. Rev. Drug. Discov., 2, (2003) and in WO 04/060965. Various reagents for pegylation of proteins are also commercially available, for example from Nektar Therapeutics, USA.

[0703] Preferably, site-directed pegylation is used, in particular via a cysteine-residue (see for example Yang et al., Protein Engineering, 16, 10, 761-770 (2003). For example, for this purpose, PEG may be attached to a cysteine residue that naturally occurs in a Nanobody of the invention, a Nanobody of the invention may be modified so as to suitably introduce one or more cysteine residues for attachment of PEG, or an amino acid sequence comprising one or more cysteine residues for attachment of PEG may be fused to the N- and/or C-terminus of a Nanobody of the invention, all using techniques of protein engineering known per se to the skilled person.

[0704] Preferably, for the Nanobodies and proteins of the invention, a PEG is used with a molecular weight of more than 5000, such as more than 10,000 and less than 200,000, such as less than 100,000; for example in the range of 20,000-80,000.

[0705] Another, usually less preferred modification comprises N-linked or O-linked glycosylation, usually as part of co-translational and/or post-translational modification, depending on the host cell used for expressing the Nanobody or polypeptide of the invention.

[0706] Yet another modification may comprise the introduction of one or more detectable labels or other signal-generating groups or moieties, depending on the intended use of the labelled Nanobody. Suitable labels and techniques for attaching, using and detecting them will be clear to the skilled person, and for example include, but are not limited to, fluorescent labels (such as fluorescein, isothiocyanate, rhodamine, phycoerythrin, phycocyanin, allophycocyanin, o-phthaldehyde, and fluorescamine and fluorescent metals such as ¹⁵²Eu or others metals from the lanthanide series), phosphorescent labels, chemiluminescent labels or bioluminescent labels (such as luminal, isoluminol, theromatic acridinium ester, imidazole, acridinium salts, oxalate ester, dioxetane or GFP and its analogs), radio-isotopes (such as ³H, ¹²⁵I, ³²P, ³⁵S, ¹⁴C, ⁵¹Cr, ³⁶Cl, ⁵⁷Co, ⁵⁸Co, ⁵⁹Fe, and ⁷⁵Se), metals, metal chelates or metallic cations (for example metallic cations such as ^{99m}Tc, ¹²³I, ¹¹¹In, ¹³¹I, ⁹⁷Ru, ⁶⁷Cu, ⁶⁷Ga, and ⁶⁸Ga or other metals or metallic cations that are particularly suited for use in in vivo, in vitro or in situ diagnosis and imaging, such as (¹⁵⁷Gd, ⁵⁵Mn, ¹⁶²Dy, ⁵²Cr, and ⁵⁶Fe), as well as chromophores and enzymes (such as malate dehydrogenase, staphylococcal nuclease, delta-V-steroid isomerase, yeast alcohol dehydrogenase, alpha-glycerophosphate dehydrogenase, triose phosphate isomerase, biotinavidin peroxidase, horseradish peroxidase, alkaline phosphatase, asparaginase, glucose oxidase, beta-galactosidase, ribonuclease, urease, catalase, glucose-VI-phosphate dehydrogenase, glucoamylase and acetylcholine esterase). Other suitable labels will be clear to the skilled person, and for example include moieties that can be detected using NMR or ESR spectroscopy.

[0707] Such labelled Nanobodies and polypeptides of the invention may for example be used for in vitro, in vivo or in situ assays (including immunoassays known per se such as ELISA, RIA, EIA and other “sandwich assays”, etc.) as well as in vivo diagnostic and imaging purposes, depending on the choice of the specific label.

[0708] As will be clear to the skilled person, another modification may involve the introduction of a chelating group, for example to chelate one of the metals or metallic cations referred to above. Suitable chelating groups for example include, without limitation, diethyl-enetriaminepentaacetic acid (DTPA) or ethylenediaminetetraacetic acid (EDTA).

[0709] Yet another modification may comprise the introduction of a functional group that is one part of a specific binding pair, such as the biotin-(strept)avidin binding pair. Such a functional group may be used to link the Nanobody of the invention to another protein, polypeptide or chemical compound that is bound to the other half of the binding pair, i.e. through formation of the binding pair. For example, a Nanobody of the invention may be conjugated to biotin, and linked to another protein, polypeptide, compound or carrier conjugated to avidin or streptavidin. For example, such a conjugated Nanobody may be used as a reporter, for example in a diagnostic system where a detectable signal-producing agent is conjugated to avidin or streptavidin. Such binding pairs may for example also be used to bind the Nanobody of the invention to a carrier, including carriers suitable for pharmaceutical purposes. One non-limiting example are the liposomal formulations described by Cao and Suresh, Journal of Drug Targetting, 8, 4, 257 (2000). Such binding pairs may also be used to link a therapeutically active agent to the Nanobody of the invention.

[0710] For some applications, in particular for those applications in which it is intended to kill a cell that expresses the target against which the Nanobodies of the invention are directed (e.g. in the treatment of cancer), or to reduce or slow the growth and/or proliferation such a cell, the Nanobodies of the invention may also be linked to a toxin or to a toxic residue or moiety. Examples of toxic moieties, compounds or residues which can be linked to a Nanobody of the invention to provide—for example—a cytotoxic compound will be clear to the skilled person and can for example be found in the prior art cited above and/or in the further description herein. One example is the so-called ADEPT™ technology described in WO 03/055527.

[0711] Other potential chemical and enzymatical modifications will be clear to the skilled person. Such modifications may also be introduced for research purposes (e.g. to study function-activity relationships). Reference is for example made to Lundblad and Bradshaw, Biotechnol. Appl. Biochem., 26, 143-151 (1997).

[0712] Preferably, the derivatives are such that they bind to RANK-L with an affinity (suitably measured and/or expressed as a K_{D}-value (actual or apparent), a K_{A}-value (actual or apparent), a kₒₙ-rate and/or a k_{off}-rate, or alternatively as an IC₅₀ value, as further described herein) that is as defined herein for the Nanobodies of the invention.

[0713] As mentioned above, the invention also relates to proteins or polypeptides that essentially consist of or comprise at least one Nanobody of the invention. By “essentially consist of” is meant that the amino acid sequence of the polypeptide of the invention either is exactly the same as the amino acid sequence of a Nanobody of the invention or corresponds to the amino acid sequence of a Nanobody of the invention which has a limited number of amino acid residues, such as 1-20 amino acid residues, for example 1-10 amino acid residues and preferably 1-6 amino acid residues, such as 1, 2, 3, 4, 5 or 6 amino acid residues, added at the amino terminal end, at the carboxy terminal end, or at both the amino terminal end and the carboxy terminal end of the amino acid sequence of the Nanobody.

[0714] Said amino acid residues may or may not change, alter or otherwise influence the (biological) properties of the Nanobody and may or may not add further functionality to the Nanobody. For example, such amino acid residues:
[0715] can comprise an N-terminal Met residue, for example as result of expression in a heterologous host cell or host organism.
[0716] may form a signal sequence or leader sequence that directs secretion of the Nanobody from a host cell upon synthesis. Suitable secretory leader peptides will be clear to the skilled person, and may be as further described herein. Usually, such a leader sequence will be linked to the N-terminus of the Nanobody, although the invention in its broadest sense is not limited thereto;
[0717] may form a sequence or signal that allows the Nanobody to be directed towards and/or to penetrate or enter into specific organs, tissues, cells, or parts or compartments of cells, and/or that allows the Nanobody to penetrate or cross a biological barrier such as a cell membrane, a cell layer such as a layer of epithelial cells, a tumor including solid tumors, or the blood-brain-barrier. Examples of such amino acid sequences will be clear to the skilled person. Some non-limiting examples are the small peptide vectors (“Pep-trans vectors”) described in WO 03/026700 and in Temsamani et al., Expert Opin. Biol. Ther., 1, 773 (2001); Temsamani and Vidal, Drug Discov. Today, 9, 1012 (004) and Rousselle, J. Pharmacol. Exp. Ther., 296, 124-131 (2001), and the membrane translocator sequence described by Zhao et al., Apoptosis, 8, 631-637 (2003). C-terminal and N-terminal amino acid sequences for intracellular targeting of antibody fragments are for example described by Cardinale et al., Methods, 34, 171 (2004). Other suitable techniques for intracellular targeting involve the expression and/or use of so-called “intrabodies” comprising a Nanobody of the invention, as mentioned below;
[0718] may form a “tag”, for example an amino acid sequence or residue that allows or facilitates the purification of the Nanobody, for example using affinity techniques directed against said sequence or residue. Thereafter, said sequence or residue may be removed (e.g. by chemical or enzymatical cleavage) to provide the Nanobody sequence (for this purpose, the tag may optionally be linked to the Nanobody sequence via a cleavable linker sequence or contain a cleavable motif). Some preferred, but non-limiting examples of such residues are multiple histidine residues, glutathione residues and a myc-tag (see for example SEQ ID NO:31 of WO 06/12282).
[0719] may be one or more amino acid residues that have been functionalized and/or that can serve as a site for attachment of functional groups. Suitable amino acid residues and functional groups will be clear to the skilled person and include, but are not limited to, the amino acid residues and functional groups mentioned herein for the derivatives of the Nanobodies of the invention.

[0720] According to another aspect, a polypeptide of the invention comprises a Nanobody of the invention, which is fused at its amino terminal end, at its carboxy terminal end, or both at its amino terminal end and at its carboxy terminal end to at least one further amino acid sequence, i.e. so as to provide a fusion protein comprising said Nanobody of the invention and the one or more further amino acid sequences. Such a fusion will also be referred to herein as a “Nanobody fusion”.

[0721] The one or more further amino acid sequence may be any suitable and/or desired amino acid sequences. The further amino acid sequences may or may not change, alter or otherwise influence the (biological) properties of the Nanobody, and may or may not add further functionality to the Nanobody or the polypeptide of the invention. Preferably, the further amino acid sequence is such that it confers one or more desired properties or functionalities to the Nanobody or the polypeptide of the invention.

[0722] For example, the further amino acid sequence may also provide a second binding site, which binding site may be directed against any desired protein, polypeptide, antigen, antigenic determinant or epitope (including but not limited to the same protein, polypeptide, antigen, antigenic determinant or epitope against which the Nanobody of the invention is directed, or a different protein, polypeptide, antigen, antigenic determinant or epitope).

[0723] Example of such amino acid sequences will be clear to the skilled person, and may generally comprise all amino acid sequences that are used in peptide fusions based on conventional antibodies and fragments thereof (including but not limited to ScFv's and single domain antibodies). Reference is for example made to the review by Holliger and Hudson, Nature Biotechnology, 23, 9, 1126-1136 (2005).

[0724] For example, such an amino acid sequence may be an amino acid sequence that increases the half-life, the solubility, or the absorption, reduces the immunogenicity or the toxicity, eliminates or attenuates undesirable side effects, and/or confers other advantageous properties to and/or reduces the undesired properties of the polypeptides of the invention, compared to the Nanobody of the invention per se. Some non-limiting examples of such amino acid sequences are serum proteins, such as human serum albumin (see for example WO 00/27435) or haptenic molecules (for example haptens that are recognized by circulating antibodies, see for example WO 98/22141).

[0725] In particular, it has been described in the art that linking fragments of immunoglobulins (such as V_{H} domains) to serum albumin or to fragments thereof can be used to increase the half-life. Reference is for made to WO 00/27435 and WO 01/077137). According to the invention, the Nanobody of the invention is preferably either directly linked to serum albumin (or to a suitable fragment thereof) or via a suitable linker, and in particular via a suitable peptide linked so that the polypeptide of the invention can be expressed as a genetic fusion (protein). According to one specific aspect, the Nanobody of the invention may be linked to a fragment of serum albumin that at least comprises the domain III of serum albumin or part thereof. Reference is for example made to WO 07/112,940 of Ablynx N.V.

[0726] Alternatively, the further amino acid sequence may provide a second binding site or binding unit that is directed against a serum protein (such as, for example, human serum albumin or another serum protein such as IgG), so as to provide increased half-life in serum. Such amino acid sequences for example include the Nanobodies described below, as well as the small peptides and binding proteins described in WO 91/01743, WO 01/45746 and WO 02/076489 and the dAb's described in WO 03/002609 and WO 04/003019. Reference is also made to Harmsen et al., Vaccine, 23 (41); 4926-42, 2005, as well as to EP 0 368 684, as well as to the following the U.S. provisional applications 60/843,349 (see also PCT/EP2007/059475), 60/850,774 (see also PCT/EP2007/060849), 60/850,775 (see also PCT/EP2007/060850) by Ablynx N.V. mentioned herein and US provisional application of Ablynx N.V. entitled “Peptides capable of binding to serum proteins” filed on Dec. 5, 2006 (see also PCT/EP2007/063348).

[0727] Such amino acid sequences may in particular be directed against serum albumin (and more in particular human serum albumin) and/or against IgG (and more in particular human IgG). For example, such amino acid sequences may be amino acid sequences that are directed against (human) serum albumin and amino acid sequences that can bind to amino acid residues on (human) serum albumin that are not involved in binding of serum albumin to FcRn (see for example WO 06/0122787) and/or amino acid sequences that are capable of binding to amino acid residues on serum albumin that do not form part of domain III of serum albumin (see again for example WO 06/0122787); amino acid sequences that have or can provide an increased half-life (see for example WO 08/028,977 by Ablynx N.V.); amino acid sequences against human serum albumin that are cross-reactive with serum albumin from at least one species of mammal, and in particular with at least one species of primate (such as, without limitation, monkeys from the genus Macaca (such as, and in particular, cynomolgus monkeys (Macaca fascicularis) and/or rhesus monkeys (Macaca mulatta)) and baboon (Papio ursinus), reference is again made to the U.S. provisional application 60/843,349 and PCT/EP2007/059475); amino acid sequences that can bind to serum albumin in a pH independent manner (see for example the U.S. provisional application 60/850,774 by Ablynx N.V. entitled “Amino acid sequences that bind to serum proteins in a manner that is essentially independent of the pH, compounds comprising the same, and uses thereof”, filed on Oct. 11, 2006; see also and PCT/EP2007/059475) and/or amino acid sequences that are conditional binders (see for example the U.S. provisional application 60/850,775 by Ablynx N.V. entitled “Amino acid sequences that bind to a desired molecule in a conditional manner”, filed on Oct. 11, 2006; see also PCT/EP2007/060850).

[0728] According to another aspect, the one or more further amino acid sequences may comprise one or more parts, fragments or domains of conventional 4-chain antibodies (and in particular human antibodies) and/or of heavy chain antibodies. For example, although usually less preferred, a Nanobody of the invention may be linked to a conventional (preferably human) V_{H} or V_{L} domain or to a natural or synthetic analog of a V_{H} or V_{L} domain, again optionally via a linker sequence (including but not limited to other (single) domain antibodies, such as the dAb's described by Ward et al.).

[0729] The at least one Nanobody may also be linked to one or more (preferably human) C_{H}1, C_{H}2 and/or C_{H}3 domains, optionally via a linker sequence. For instance, a Nanobody linked to a suitable C_{H}1 domain could for example be used—together with suitable light chains—to generate antibody fragments/structures analogous to conventional Fab fragments or F(ab′)₂ fragments, but in which one or (in case of an F(ab′)₂ fragment) one or both of the conventional V_{H} domains have been replaced by a Nanobody of the invention. Also, two Nanobodies could be linked to a C_{H}3 domain (optionally via a linker) to provide a construct with increased half-life in vivo.

[0730] According to one specific aspect of a polypeptide of the invention, one or more Nanobodies of the invention may be linked (optionally via a suitable linker or hinge region) to one or more constant domains (for example, 2 or 3 constant domains that can be used as part of/to form an Fc portion), to an Fc portion and/or to one or more antibody parts, fragments or domains that confer one or more effector functions to the polypeptide of the invention and/or may confer the ability to bind to one or more Fc receptors. For example, for this purpose, and without being limited thereto, the one or more further amino acid sequences may comprise one or more C_{H}2 and/or C_{H}3 domains of an antibody, such as from a heavy chain antibody (as described herein) and more preferably from a conventional human 4-chain antibody; and/or may form (part of) and Fc region, for example from IgG (e.g. from IgG1, IgG2, IgG3 or IgG4), from IgE or from another human Ig such as IgA, IgD or IgM. For example, WO 94/04678 describes heavy chain antibodies comprising a Camelid V_{HH} domain or a humanized derivative thereof (i.e. a Nanobody), in which the Camelidae C_{H}2 and/or C_{H}3 domain have been replaced by human C_{H}2 and C_{H}3 domains, so as to provide an immunoglobulin that consists of 2 heavy chains each comprising a Nanobody and human C_{H}2 and C_{H}3 domains (but no C_{H}1 domain), which immunoglobulin has the effector function provided by the C_{H}2 and C_{H}3 domains and which immunoglobulin can function without the presence of any light chains. Other amino acid sequences that can be suitably linked to the Nanobodies of the invention so as to provide an effector function will be clear to the skilled person, and may be chosen on the basis of the desired effector function(s). Reference is for example made to WO 04/058820, WO 99/42077, WO 02/056910 and WO 05/017148, as well as the review by Holliger and Hudson, supra and to the non-prepublished US provisional application by Ablynx N.V. entitled “Constructs comprising single variable domains and an Fc portion derived from IgE” which has a filing date of Dec. 4, 2007. Coupling of a Nanobody of the invention to an Fc portion may also lead to an increased half-life, compared to the corresponding Nanobody of the invention. For some applications, the use of an Fc portion and/or of constant domains (i.e. C_{H}2 and/or C_{H}3 domains) that confer increased half-life without any biologically significant effector function may also be suitable or even preferred. Other suitable constructs comprising one or more Nanobodies and one or more constant domains with increased half-life in vivo will be clear to the skilled person, and may for example comprise two Nanobodies linked to a C_{H}3 domain, optionally via a linker sequence. Generally, any fusion protein or derivatives with increased half-life will preferably have a molecular weight of more than 50 kD, the cut-off value for renal absorption.

[0731] In another one specific, but non-limiting, aspect, in order to form a polypeptide of the invention, one or more amino acid sequences of the invention may be linked (optionally via a suitable linker or hinge region) to naturally occurring, synthetic or semisynthetic constant domains (or analogs, variants, mutants, parts or fragments thereof) that have a reduced (or essentially no) tendency to self-associate into dimers (i.e. compared to constant domains that naturally occur in conventional 4-chain antibodies). Such monomeric (i.e. not self-associating) Fc chain variants, or fragments thereof, will be clear to the skilled person. For example, Helm et al., J Biol Chem 1996 271 7494, describe monomeric Fcε chain variants that can be used in the polypeptide chains of the invention.

[0732] Also, such monomeric Fc chain variants are preferably such that they are still capable of binding to the complement or the relevant Fc receptor(s) (depending on the Fc portion from which they are derived), and/or such that they still have some or all of the effector functions of the Fc portion from which they are derived (or at a reduced level still suitable for the intended use). Alternatively, in such a polypeptide chain of the invention, the monomeric Fc chain may be used to confer increased half-life upon the polypeptide chain, in which case the monomeric Fc chain may also have no or essentially no effector functions.

[0733] Bivalent/multivalent, bispecific/multispecific or biparatopic/multiparatopic polypeptides of the invention may also be linked to Fc portions, in order to provide polypeptide constructs of the type that is described in the non-prepublished U.S. provisional application 61/005,331 entitled “immunoglobulin constructs” filed on Dec. 4, 2007.

[0734] The further amino acid sequences may also form a signal sequence or leader sequence that directs secretion of the Nanobody or the polypeptide of the invention from a host cell upon synthesis (for example to provide a pre-, pro- or prepro-form of the polypeptide of the invention, depending on the host cell used to express the polypeptide of the invention).

[0735] The further amino acid sequence may also form a sequence or signal that allows the Nanobody or polypeptide of the invention to be directed towards and/or to penetrate or enter into specific organs, tissues, cells, or parts or compartments of cells, and/or that allows the Nanobody or polypeptide of the invention to penetrate or cross a biological barrier such as a cell membrane, a cell layer such as a layer of epithelial cells, a tumor including solid tumors, or the blood-brain-barrier. Suitable examples of such amino acid sequences will be clear to the skilled person, and for example include, but are not limited to, the “Peptrans” vectors mentioned above, the sequences described by Cardinale et al. and the amino acid sequences and antibody fragments known per se that can be used to express or produce the Nanobodies and polypeptides of the invention as so-called “intrabodies”, for example as described in WO 94/02610, WO 95/22618, U.S. Pat. No. 7,004,940, WO 03/014960, WO 99/07414; WO 05/01690; EP 1 512 696; and in Cattaneo, A. & Biocca, S. (1997) Intracellular Antibodies: Development and Applications. Landes and Springer-Verlag; and in Kontermann, Methods 34, (2004), 163-170, and the further references described therein.

[0736] For some applications, in particular for those applications in which it is intended to kill a cell that expresses the target against which the Nanobodies of the invention are directed (e.g. in the treatment of cancer), or to reduce or slow the growth and/or proliferation of such a cell, the Nanobodies of the invention may also be linked to a (cyto)toxic protein or polypeptide. Examples of such toxic proteins and polypeptides which can be linked to a Nanobody of the invention to provide—for example—a cytotoxic polypeptide of the invention will be clear to the skilled person and can for example be found in the prior art cited above and/or in the further description herein. One example is the so-called ADEPT™ technology described in WO 03/055527.

[0737] According to one preferred, but non-limiting aspect, said one or more further amino acid sequences comprise at least one further Nanobody, so as to provide a polypeptide of the invention that comprises at least two, such as three, four, five or more Nanobodies, in which said Nanobodies may optionally be linked via one or more linker sequences (as defined herein). Polypeptides of the invention that comprise two or more Nanobodies, of which at least one is a Nanobody of the invention, will also be referred to herein as “multivalent” polypeptides of the invention, and the Nanobodies present in such polypeptides will also be referred to herein as being in a “multivalent format”. For example a “bivalent” polypeptide of the invention comprises two Nanobodies, optionally linked via a linker sequence, whereas a “trivalent” polypeptide of the invention comprises three Nanobodies, optionally linked via two linker sequences; etc.; in which at least one of the Nanobodies present in the polypeptide, and up to all of the Nanobodies present in the polypeptide, is/are a Nanobody of the invention.

[0738] In a multivalent polypeptide of the invention, the two or more Nanobodies may be the same or different, and may be directed against the same antigen or antigenic determinant (for example against the same part(s) or epitope(s) or against different parts or epitopes) or may alternatively be directed against different antigens or antigenic determinants; or any suitable combination thereof. For example, a bivalent polypeptide of the invention may comprise (a) two identical Nanobodies; (b) a first Nanobody directed against a first antigenic determinant of a protein or antigen and a second Nanobody directed against the same antigenic determinant of said protein or antigen which is different from the first Nanobody; (c) a first Nanobody directed against a first antigenic determinant of a protein or antigen and a second Nanobody directed against another antigenic determinant of said protein or antigen; or (d) a first Nanobody directed against a first protein or antigen and a second Nanobody directed against a second protein or antigen (i.e. different from said first antigen). Similarly, a trivalent polypeptide of the invention may, for example and without being limited thereto. comprise (a) three identical Nanobodies; (b) two identical Nanobody against a first antigenic determinant of an antigen and a third Nanobody directed against a different antigenic determinant of the same antigen; (c) two identical Nanobody against a first antigenic determinant of an antigen and a third Nanobody directed against a second antigen different from said first antigen; (d) a first Nanobody directed against a first antigenic determinant of a first antigen, a second Nanobody directed against a second antigenic determinant of said first antigen and a third Nanobody directed against a second antigen different from said first antigen; or (e) a first Nanobody directed against a first antigen, a second Nanobody directed against a second antigen different from said first antigen, and a third Nanobody directed against a third antigen different from said first and second antigen.

[0739] Polypeptides of the invention that contain at least two Nanobodies, in which at least one Nanobody is directed against a first antigen (i.e. against RANK-L) and at least one Nanobody is directed against a second antigen (i.e. different from RANK-L), will also be referred to as “multispecific” polypeptides of the invention, and the Nanobodies present in such polypeptides will also be referred to herein as being in a “multispecific format”. Thus, for example, a “bispecific” polypeptide of the invention is a polypeptide that comprises at least one Nanobody directed against a first antigen (i.e. RANK-L) and at least one further Nanobody directed against a second antigen (i.e. different from RANK-L), whereas a “trispecific” polypeptide of the invention is a polypeptide that comprises at least one Nanobody directed against a first antigen (i.e. RANK-L), at least one further Nanobody directed against a second antigen (i.e. different from RANK-L) and at least one further Nanobody directed against a third antigen (i.e. different from both RANK-L, and the second antigen); etc.

[0740] Accordingly, in its simplest form, a bispecific polypeptide of the invention is a bivalent polypeptide of the invention (as defined herein), comprising a first Nanobody directed against RANK-L, and a second Nanobody directed against a second antigen, in which said first and second Nanobody may optionally be linked via a linker sequence (as defined herein); whereas a trispecific polypeptide of the invention in its simplest form is a trivalent polypeptide of the invention (as defined herein), comprising a first Nanobody directed against RANK-L, a second Nanobody directed against a second antigen and a third Nanobody directed against a third antigen, in which said first, second and third Nanobody may optionally be linked via one or more, and in particular one and more, in particular two, linker sequences.

[0741] However, as will be clear from the description hereinabove, the invention is not limited thereto, in the sense that a multispecific polypeptide of the invention may comprise at least one Nanobody against RANK-L, and any number of Nanobodies directed against one or more antigens different from RANK-L.

[0742] Furthermore, although it is encompassed within the scope of the invention that the specific order or arrangement of the various Nanobodies in the polypeptides of the invention may have some influence on the properties of the final polypeptide of the invention (including but not limited to the affinity, specificity or avidity for RANK-L, or against the one or more other antigens), said order or arrangement is usually not critical and may be suitably chosen by the skilled person, optionally after some limited routine experiments based on the disclosure herein. Thus, when reference is made to a specific multivalent or multispecific polypeptide of the invention, it should be noted that this encompasses any order or arrangements of the relevant Nanobodies, unless explicitly indicated otherwise.

[0743] Finally, it is also within the scope of the invention that the polypeptides of the invention contain two or more Nanobodies and one or more further amino acid sequences (as mentioned herein).

[0744] For multivalent and multispecific polypeptides containing one or more V_{HH} domains and their preparation, reference is also made to Conrath et al., J. Biol. Chem., Vol. 276, 10. 7346-7350, 2001; Muyldermans, Reviews in Molecular Biotechnology 74 (2001), 277-302; as well as to for example WO 96/34103 and WO 99/23221. Some other examples of some specific multispecific and/or multivalent polypeptide of the invention can be found in the applications by Ablynx N.V. referred to herein.

[0745] One preferred, but non-limiting example of a multispecific polypeptide of the invention comprises at least one Nanobody of the invention and at least one Nanobody that provides for an increased half-life. Such Nanobodies may for example be Nanobodies that are directed against a serum protein, and in particular a human serum protein, such as human serum albumin, thyroxine-binding protein, (human) transferrin, fibrinogen, an immunoglobulin such as IgG, IgE or IgM, or against one of the serum proteins listed in WO 04/003019. Of these, Nanobodies that can bind to serum albumin (and in particular human serum albumin) or to IgG (and in particular human IgG, see for example Nanobody VH-1 described in the review by Muyldermans, supra) are particularly preferred (although for example, for experiments in mice or primates, Nanobodies against or cross-reactive with mouse serum albumin (MSA) or serum albumin from said primate, respectively, can be used. However, for pharmaceutical use, Nanobodies against human serum albumin or human IgG will usually be preferred). Nanobodies that provide for increased half-life and that can be used in the polypeptides of the invention include the Nanobodies directed against serum albumin that are described in WO 04/041865, in WO 06/122787 and in the further patent applications by Ablynx N.V., such as those mentioned above.

[0746] For example, the some preferred Nanobodies that provide for increased half-life for use in the present invention include Nanobodies that can bind to amino acid residues on (human) serum albumin that are not involved in binding of serum albumin to FcRn (see for example WO 06/0122787); Nanobodies that are capable of binding to amino acid residues on serum albumin that do not form part of domain III of serum albumin (see for example WO 06/0122787); Nanobodies that have or can provide an increased half-life (see for example the U.S. provisional application 60/843,349 by Ablynx N.V mentioned herein; see also PCT/EP2007/059475); Nanobodies against human serum albumin that are cross-reactive with serum albumin from at least one species of mammal, and in particular with at least one species of primate (such as, without limitation, monkeys from the genus Macaca (such as, and in particular, cynomolgus monkeys (Macaca fascicularis) and/or rhesus monkeys (Macaca mulatta)) and baboon (Papio ursinus)) (see for example the U.S. provisional application 60/843,349 by Ablynx N.V; see also PCT/EP2007/059475); Nanobodies that can bind to serum albumin in a pH independent manner (see for example the U.S. provisional application 60/850,774 by Ablynx N.V.; see also PCT/EP2007/060849) and/or Nanobodies that are conditional binders (see for example the U.S. provisional application 60/850,775 by Ablynx N.V.; see also PCT/EP2007/060850).

[0747] Some particularly preferred Nanobodies that provide for increased half-life and that can be used in the polypeptides of the invention include the Nanobodies ALB-1 to ALB-10 disclosed in WO 06/122787 (see Tables II and III) of which ALB-8 (SEQ ID NO: 62 in WO 06/122787) is particularly preferred.

[0748] Some preferred, but non-limiting examples of polypeptides of the invention that comprise at least one Nanobody of the invention and at least one Nanobody that provides for increased half-life are given in SEQ ID NO's 694-729 and 759-760.

[0749] According to a specific, but non-limiting aspect of the invention, the polypeptides of the invention contain, besides the one or more Nanobodies of the invention, at least one Nanobody against human serum albumin.

[0750] Generally, any polypeptides of the invention with increased half-life that contain one or more Nanobodies of the invention, and any derivatives of Nanobodies of the invention or of such polypeptides that have an increased half-life, preferably have a half-life that is at least 1.5 times, preferably at least 2 times, such as at least 5 times, for example at least 10 times or more than 20 times, greater than the half-life of the corresponding Nanobody of the invention per se. For example, such a derivative or polypeptides with increased half-life may have a half-life that is increased with more than 1 hours, preferably more than 2 hours, more preferably more than 6 hours, such as more than 12 hours, or even more than 24, 48 or 72 hours, compared to the corresponding Nanobody of the invention per se.

[0751] In a preferred, but non-limiting aspect of the invention, such derivatives or polypeptides may exhibit a serum half-life in human of at least about 12 hours, preferably at least 24 hours, more preferably at least 48 hours, even more preferably at least 72 hours or more. For example, such derivatives or polypeptides may have a half-life of at least 5 days (such as about 5 to 10 days), preferably at least 9 days (such as about 9 to 14 days), more preferably at least about 10 days (such as about 10 to 15 days), or at least about 11 days (such as about 11 to 16 days), more preferably at least about 12 days (such as about 12 to 18 days or more), or more than 14 days (such as about 14 to 19 days).

[0752] According to one aspect of the invention the polypeptides are capable of binding to one or more molecules which can increase the half-life of the polypeptide in vivo.

[0753] The polypeptides of the invention are stabilised in vivo and their half-life increased by binding to molecules which resist degradation and/or clearance or sequestration. Typically, such molecules are naturally occurring proteins which themselves have a long half-life in vivo.

[0754] Another preferred, but non-limiting example of a multispecific polypeptide of the invention comprises at least one Nanobody of the invention and at least one Nanobody that directs the polypeptide of the invention towards, and/or that allows the polypeptide of the invention to penetrate or to enter into specific organs, tissues, cells, or parts or compartments of cells, and/or that allows the Nanobody to penetrate or cross a biological barrier such as a cell membrane, a cell layer such as a layer of epithelial cells, a tumor including solid tumors, or the blood-brain-barrier. Examples of such Nanobodies include Nanobodies that are directed towards specific cell-surface proteins, markers or epitopes of the desired organ, tissue or cell (for example cell-surface markers associated with tumor cells), and the single-domain brain targeting antibody fragments described in WO 02/057445 and WO 06/040153, of which FC44 (SEQ ID NO: 189 of WO 06/040153) and FC5 (SEQ ID NO: 190 of WO 06/040154) are preferred examples.

[0755] In the polypeptides of the invention, the one or more Nanobodies and the one or more polypeptides may be directly linked to each other (as for example described in WO 99/23221) and/or may be linked to each other via one or more suitable spacers or linkers, or any combination thereof.

[0756] Suitable spacers or linkers for use in multivalent and multispecific polypeptides will be clear to the skilled person, and may generally be any linker or spacer used in the art to link amino acid sequences. Preferably, said linker or spacer is suitable for use in constructing proteins or polypeptides that are intended for pharmaceutical use.

[0757] Some particularly preferred spacers include the spacers and linkers that are used in the art to link antibody fragments or antibody domains. These include the linkers mentioned in the general background art cited above, as well as for example linkers that are used in the art to construct diabodies or ScFv fragments (in this respect, however, its should be noted that, whereas in diabodies and in ScFv fragments, the linker sequence used should have a length, a degree of flexibility and other properties that allow the pertinent V_{H} and V_{L} domains to come together to form the complete antigen-binding site, there is no particular limitation on the length or the flexibility of the linker used in the polypeptide of the invention, since each Nanobody by itself forms a complete antigen-binding site).

[0758] For example, a linker may be a suitable amino acid sequence, and in particular amino acid sequences of between 1 and 50, preferably between 1 and 30, such as between 1 and 10 amino acid residues. Some preferred examples of such amino acid sequences include gly-ser linkers, for example of the type (glyₓser_{y})_{z}, such as (for example (gly₄ser)₃ or (gly₃ser₂)₃, as described in WO 99/42077 and the GS30, GS15, GS9 and GS7 linkers described in the applications by Ablynx mentioned herein (see for example WO 06/040153 and WO 06/122825), as well as hinge-like regions, such as the hinge regions of naturally occurring heavy chain antibodies or similar sequences (such as described in WO 94/04678).

[0759] Some other particularly preferred linkers are poly-alanine (such as AAA), as well as the linkers GS30 (SEQ ID NO: 85 in WO 06/122825) and GS9 (SEQ ID NO: 84 in WO 06/122825).

[0760] Other suitable linkers generally comprise organic compounds or polymers, in particular those suitable for use in proteins for pharmaceutical use. For instance, poly(ethyleneglycol) moieties have been used to link antibody domains, see for example WO 04/081026.

[0761] It is encompassed within the scope of the invention that the length, the degree of flexibility and/or other properties of the linker(s) used (although not critical, as it usually is for linkers used in ScFv fragments) may have some influence on the properties of the final polypeptide of the invention, including but not limited to the affinity, specificity or avidity for RANK-L, or for one or more of the other antigens. Based on the disclosure herein, the skilled person will be able to determine the optimal linker(s) for use in a specific polypeptide of the invention, optionally after some limited routine experiments.

[0762] For example, in multivalent polypeptides of the invention that comprise Nanobodies directed against a multimeric antigen (such as a multimeric receptor or other protein), the length and flexibility of the linker are preferably such that it allows each Nanobody of the invention present in the polypeptide to bind to the antigenic determinant on each of the subunits of the multimer. Similarly, in a multispecific polypeptide of the invention that comprises Nanobodies directed against two or more different antigenic determinants on the same antigen (for example against different epitopes of an antigen and/or against different subunits of a multimeric receptor, channel or protein), the length and flexibility of the linker are preferably such that it allows each Nanobody to bind to its intended antigenic determinant. Again, based on the disclosure herein, the skilled person will be able to determine the optimal linker(s) for use in a specific polypeptide of the invention, optionally after some limited routine experiments.

[0763] It is also within the scope of the invention that the linker(s) used confer one or more other favourable properties or functionality to the polypeptides of the invention, and/or provide one or more sites for the formation of derivatives and/or for the attachment of functional groups (e.g. as described herein for the derivatives of the Nanobodies of the invention). For example, linkers containing one or more charged amino acid residues (see Table A-2 above) can provide improved hydrophilic properties, whereas linkers that form or contain small epitopes or tags can be used for the purposes of detection, identification and/or purification. Again, based on the disclosure herein, the skilled person will be able to determine the optimal linkers for use in a specific polypeptide of the invention, optionally after some limited routine experiments.

[0764] Finally, when two or more linkers are used in the polypeptides of the invention, these linkers may be the same or different. Again, based on the disclosure herein, the skilled person will be able to determine the optimal linkers for use in a specific polypeptide of the invention, optionally after some limited routine experiments.

[0765] Usually, for easy of expression and production, a polypeptide of the invention will be a linear polypeptide. However, the invention in its broadest sense is not limited thereto. For example, when a polypeptide of the invention comprises three of more Nanobodies, it is possible to link them by use of a linker with three or more “arms”, which each “arm” being linked to a Nanobody, so as to provide a “star-shaped” construct. It is also possible, although usually less preferred, to use circular constructs.

[0766] The invention also comprises derivatives of the polypeptides of the invention, which may be essentially analogous to the derivatives of the Nanobodies of the invention, i.e. as described herein.

[0767] The invention also comprises proteins or polypeptides that “essentially consist” of a polypeptide of the invention (in which the wording “essentially consist of” has essentially the same meaning as indicated hereinabove).

[0768] According to one aspect of the invention, the polypeptide of the invention is in essentially isolated from, as defined herein.

[0769] The amino acid sequences, Nanobodies, polypeptides and nucleic acids of the invention can be prepared in a manner known per se, as will be clear to the skilled person from the further description herein. For example, the Nanobodies and polypeptides of the invention can be prepared in any manner known per se for the preparation of antibodies and in particular for the preparation of antibody fragments (including but not limited to (single) domain antibodies and ScFv fragments). Some preferred, but non-limiting methods for preparing the amino acid sequences, Nanobodies, polypeptides and nucleic acids include the methods and techniques described herein.

[0770] As will be clear to the skilled person, one particularly useful method for preparing an amino acid sequence, Nanobody and/or a polypeptide of the invention generally comprises the steps of:
[0771] i) the expression, in a suitable host cell or host organism (also referred to herein as a “host of the invention”) or in another suitable expression system of a nucleic acid that encodes said amino acid sequence, Nanobody or polypeptide of the invention (also referred to herein as a “nucleic acid of the invention”), optionally followed by:
[0772] ii) isolating and/or purifying the amino acid sequence, Nanobody or polypeptide of the invention thus obtained.

[0773] In particular, such a method may comprise the steps of:
[0774] i) cultivating and/or maintaining a host of the invention under conditions that are such that said host of the invention expresses and/or produces at least one amino acid sequence, Nanobody and/or polypeptide of the invention; optionally followed by:
[0775] ii) isolating and/or purifying the amino acid sequence, Nanobody or polypeptide of the invention thus obtained.

[0776] A nucleic acid of the invention can be in the form of single or double stranded DNA or RNA, and is preferably in the form of double stranded DNA. For example, the nucleotide sequences of the invention may be genomic DNA, cDNA or synthetic DNA (such as DNA with a codon usage that has been specifically adapted for expression in the intended host cell or host organism).

[0777] According to one aspect of the invention, the nucleic acid of the invention is in essentially isolated from, as defined herein.

[0778] The nucleic acid of the invention may also be in the form of, be present in and/or be part of a vector, such as for example a plasmid, cosmid or YAC, which again may be in essentially isolated form.

[0779] The nucleic acids of the invention can be prepared or obtained in a manner known per se, based on the information on the amino acid sequences for the polypeptides of the invention given herein, and/or can be isolated from a suitable natural source. To provide analogs, nucleotide sequences encoding naturally occurring V_{HH} domains can for example be subjected to site-directed mutagenesis, so at to provide a nucleic acid of the invention encoding said analog. Also, as will be clear to the skilled person, to prepare a nucleic acid of the invention, also several nucleotide sequences, such as at least one nucleotide sequence encoding a Nanobody and for example nucleic acids encoding one or more linkers can be linked together in a suitable manner.

[0780] Techniques for generating the nucleic acids of the invention will be clear to the skilled person and may for instance include, but are not limited to, automated DNA synthesis; site-directed mutagenesis; combining two or more naturally occurring and/or synthetic sequences (or two or more parts thereof), introduction of mutations that lead to the expression of a truncated expression product; introduction of one or more restriction sites (e.g. to create cassettes and/or regions that may easily be digested and/or ligated using suitable restriction enzymes), and/or the introduction of mutations by means of a PCR reaction using one or more “mismatched” primers. These and other techniques will be clear to the skilled person, and reference is again made to the standard handbooks, such as Sambrook et al. and Ausubel et al., mentioned above, as well as the Examples below.

[0781] The nucleic acid of the invention may also be in the form of, be present in and/or be part of a genetic construct, as will be clear to the person skilled in the art. Such genetic constructs generally comprise at least one nucleic acid of the invention that is optionally linked to one or more elements of genetic constructs known per se, such as for example one or more suitable regulatory elements (such as a suitable promoter(s), enhancer(s), terminator(s), etc.) and the further elements of genetic constructs referred to herein. Such genetic constructs comprising at least one nucleic acid of the invention will also be referred to herein as “genetic constructs of the invention”.

[0782] The genetic constructs of the invention may be DNA or RNA, and are preferably double-stranded DNA. The genetic constructs of the invention may also be in a form suitable for transformation of the intended host cell or host organism, in a form suitable for integration into the genomic DNA of the intended host cell or in a form suitable for independent replication, maintenance and/or inheritance in the intended host organism. For instance, the genetic constructs of the invention may be in the form of a vector, such as for example a plasmid, cosmid, YAC, a viral vector or transposon. In particular, the vector may be an expression vector, i.e. a vector that can provide for expression in vitro and/or in vivo (e.g. in a suitable host cell, host organism and/or expression system).

[0783] In a preferred but non-limiting aspect, a genetic construct of the invention comprises
[0784] i) at least one nucleic acid of the invention; operably connected to
[0785] ii) one or more regulatory elements, such as a promoter and optionally a suitable terminator;
   and optionally also
[0786] iii) one or more further elements of genetic constructs known per se;
   in which the terms “regulatory element”, “promoter”, “terminator” and “operably connected” have their usual meaning in the art (as further described herein); and in which said “further elements” present in the genetic constructs may for example be 3′- or 5′-UTR sequences, leader sequences, selection markers, expression markers/reporter genes, and/or elements that may facilitate or increase (the efficiency of) transformation or integration. These and other suitable elements for such genetic constructs will be clear to the skilled person, and may for instance depend upon the type of construct used, the intended host cell or host organism; the manner in which the nucleotide sequences of the invention of interest are to be expressed (e.g. via constitutive, transient or inducible expression); and/or the transformation technique to be used. For example, regulatory sequences, promoters and terminators known per se for the expression and production of antibodies and antibody fragments (including but not limited to (single) domain antibodies and ScFv fragments) may be used in an essentially analogous manner.

[0787] Preferably, in the genetic constructs of the invention, said at least one nucleic acid of the invention and said regulatory elements, and optionally said one or more further elements, are “operably linked” to each other, by which is generally meant that they are in a functional relationship with each other. For instance, a promoter is considered “operably linked” to a coding sequence if said promoter is able to initiate or otherwise control/regulate the transcription and/or the expression of a coding sequence (in which said coding sequence should be understood as being “under the control of” said promoter). Generally, when two nucleotide sequences are operably linked, they will be in the same orientation and usually also in the same reading frame. They will usually also be essentially contiguous, although this may also not be required.

[0788] Preferably, the regulatory and further elements of the genetic constructs of the invention are such that they are capable of providing their intended biological function in the intended host cell or host organism.

[0789] For instance, a promoter, enhancer or terminator should be “operable” in the intended host cell or host organism, by which is meant that (for example) said promoter should be capable of initiating or otherwise controlling/regulating the transcription and/or the expression of a nucleotide sequence—e.g. a coding sequence—to which it is operably linked (as defined herein).

[0790] Some particularly preferred promoters include, but are not limited to, promoters known per se for the expression in the host cells mentioned herein; and in particular promoters for the expression in the bacterial cells, such as those mentioned herein and/or those used in the Examples.

[0791] A selection marker should be such that it allows—i.e. under appropriate selection conditions—host cells and/or host organisms that have been (successfully) transformed with the nucleotide sequence of the invention to be distinguished from host cells/organisms that have not been (successfully) transformed. Some preferred, but non-limiting examples of such markers are genes that provide resistance against antibiotics (such as kanamycin or ampicillin), genes that provide for temperature resistance, or genes that allow the host cell or host organism to be maintained in the absence of certain factors, compounds and/or (food) components in the medium that are essential for survival of the non-transformed cells or organisms.

[0792] A leader sequence should be such that—in the intended host cell or host organism—it allows for the desired post-translational modifications and/or such that it directs the transcribed mRNA to a desired part or organelle of a cell. A leader sequence may also allow for secretion of the expression product from said cell. As such, the leader sequence may be any pro-, pre-, or prepro-sequence operable in the host cell or host organism. Leader sequences may not be required for expression in a bacterial cell. For example, leader sequences known per se for the expression and production of antibodies and antibody fragments (including but not limited to single domain antibodies and ScFv fragments) may be used in an essentially analogous manner.

[0793] An expression marker or reporter gene should be such that—in the host cell or host organism—it allows for detection of the expression of (a gene or nucleotide sequence present on) the genetic construct. An expression marker may optionally also allow for the localisation of the expressed product, e.g. in a specific part or organelle of a cell and/or in (a) specific cell(s), tissue(s), organ(s) or part(s) of a multicellular organism. Such reporter genes may also be expressed as a protein fusion with the amino acid sequence of the invention. Some preferred, but non-limiting examples include fluorescent proteins such as GFP.

[0794] Some preferred, but non-limiting examples of suitable promoters, terminator and further elements include those that can be used for the expression in the host cells mentioned herein; and in particular those that are suitable for expression in bacterial cells, such as those mentioned herein and/or those used in the Examples below. For some (further) non-limiting examples of the promoters, selection markers, leader sequences, expression markers and further elements that may be present/used in the genetic constructs of the invention—such as terminators, transcriptional and/or translational enhancers and/or integration factors—reference is made to the general handbooks such as Sambrook et al. and Ausubel et al. mentioned above, as well as to the examples that are given in WO 95/07463, WO 96/23810, WO 95/07463, WO 95/21191, WO 97/11094, WO 97/42320, WO 98/06737, WO 98/21355, U.S. Pat. No. 7,207,410, U.S. Pat. No. 5,693,492 and EP 1 085 089. Other examples will be clear to the skilled person. Reference is also made to the general background art cited above and the further references cited herein.

[0795] The genetic constructs of the invention may generally be provided by suitably linking the nucleotide sequence(s) of the invention to the one or more further elements described above, for example using the techniques described in the general handbooks such as Sambrook et al. and Ausubel et al., mentioned above.

[0796] Often, the genetic constructs of the invention will be obtained by inserting a nucleotide sequence of the invention in a suitable (expression) vector known per se. Some preferred, but non-limiting examples of suitable expression vectors are those used in the Examples below, as well as those mentioned herein.

[0797] The nucleic acids of the invention and/or the genetic constructs of the invention may be used to transform a host cell or host organism, i.e. for expression and/or production of the amino acid sequence, Nanobody or polypeptide of the invention. Suitable hosts or host cells will be clear to the skilled person, and may for example be any suitable fungal, prokaryotic or eukaryotic cell or cell line or any suitable fungal, prokaryotic or eukaryotic organism, for example:
[0798] a bacterial strain, including but not limited to gram-negative strains such as strains of Escherichia coli; of Proteus, for example of Proteus mirabilis; of Pseudomonas, for example of Pseudomonas fluorescens; and gram-positive strains such as strains of Bacillus, for example of Bacillus subtilis or of Bacillus brevis; of Streptomyces, for example of Streptomyces lividans; of Staphylococcus, for example of Staphylococcus carnosus; and of Lactococcus, for example of Lactococcus lactis;
[0799] a fungal cell, including but not limited to cells from species of Trichoderma, for example from Trichoderma reesei; of Neurospora, for example from Neurospora crassa; of Sordaria, for example from Sordaria macrospora; of Aspergillus, for example from Aspergillus niger or from Aspergillus sojae; or from other filamentous fungi;
[0800] a yeast cell, including but not limited to cells from species of Saccharomyces, for example of Saccharomyces cerevisiae; of Schizosaccharomyces, for example of Schizosaccharomyces pombe; of Pichia, for example of Pichia pastoris or of Pichia methanolica; of Hansenula, for example of Hansenula polymorpha; of Kluyveromyces, for example of Kluyveromyces lactis; of Arxula, for example of Arxula adeninivorans; of Yarrowia, for example of Yarrowia lipolytica;
[0801] an amphibian cell or cell line, such as Xenopus oocytes;
[0802] an insect-derived cell or cell line, such as cells/cell lines derived from lepidoptera, including but not limited to Spodoptera SF9 and Sf21 cells or cells/cell lines derived from Drosophila, such as Schneider and Kc cells;
[0803] a plant or plant cell, for example in tobacco plants; and/or
[0804] a mammalian cell or cell line, for example a cell or cell line derived from a human, a cell or a cell line from mammals including but not limited to CHO-cells, BHK-cells (for example BHK-21 cells) and human cells or cell lines such as HeLa, COS (for example COS-7) and PER.C6 cells;
   as well as all other hosts or host cells known per se for the expression and production of antibodies and antibody fragments (including but not limited to (single) domain antibodies and ScFv fragments), which will be clear to the skilled person. Reference is also made to the general background art cited hereinabove, as well as to for example WO 94/29457; WO 96/34103; WO 99/42077; Frenken et al., (1998), supra; Riechmann and Muyldermans, (1999), supra; van der Linden, (2000), supra; Thomassen et al., (2002), supra; Joosten et al., (2003), supra; Joosten et al., (2005), supra; and the further references cited herein.

[0805] The amino acid sequences, Nanobodies and polypeptides of the invention can also be introduced and expressed in one or more cells, tissues or organs of a multicellular organism, for example for prophylactic and/or therapeutic purposes (e.g. as a gene therapy). For this purpose, the nucleotide sequences of the invention may be introduced into the cells or tissues in any suitable way, for example as such (e.g. using liposomes) or after they have been inserted into a suitable gene therapy vector (for example derived from retroviruses such as adenovirus, or parvoviruses such as adeno-associated virus). As will also be clear to the skilled person, such gene therapy may be performed in vivo and/or in situ in the body of a patient by administering a nucleic acid of the invention or a suitable gene therapy vector encoding the same to the patient or to specific cells or a specific tissue or organ of the patient; or suitable cells (often taken from the body of the patient to be treated, such as explanted lymphocytes, bone marrow aspirates or tissue biopsies) may be treated in vitro with a nucleotide sequence of the invention and then be suitably (re-)introduced into the body of the patient. All this can be performed using gene therapy vectors, techniques and delivery systems which are well known to the skilled person, and for example described in Culver, K. W., “Gene Therapy”, 1994, p. xii, Mary Ann Liebert, Inc., Publishers, New York, N.Y.); Giordano, Nature F Medicine 2 (1996), 534-539; Schaper, Circ. Res. 79 (1996), 911-919; Anderson, Science 256 (1992), 808-813; Verma, Nature 389 (1994), 239; Isner, Lancet 348 (1996), 370-374; Muhlhauser, Circ. Res. 77 (1995), 1077-1086; Onodera, Blood 91; (1998), 30-36; Verma, Gene Ther. 5 (1998), 692-699; Nabel, Ann. N.Y. Acad. Sci.: 811 (1997), 289-292; Verzeletti, Hum. Gene Ther. 9 (1998), 2243-51; Wang, Nature Medicine 2 (1996), 714-716; WO 94/29469; WO 97/00957, U.S. Pat. No. 5,580,859; U.S. Pat. No. 5,5895,466; or Schaper, Current Opinion in Biotechnology 7 (1996), 635-640. For example, in situ expression of ScFv fragments (Afanasieva et al., Gene Ther., 10, 1850-1859 (2003)) and of diabodies (Blanco et al., J. Immunol, 171, 1070-1077 (2003)) has been described in the art.

[0806] For expression of the Nanobodies in a cell, they may also be expressed as so-called “intrabodies”, as for example described in WO 94/02610, WO 95/22618 and U.S. Pat. No. 7,004,940; WO 03/014960; in Cattaneo, A. & Biocca, S. (1997) Intracellular Antibodies: Development and Applications. Landes and Springer-Verlag; and in Kontermann, Methods 34, (2004), 163-170.

[0807] The amino acid sequences, Nanobodies and polypeptides of the invention can for example also be produced in the milk of transgenic mammals, for example in the milk of rabbits, cows, goats or sheep (see for example U.S. Pat. No. 6,741,957, U.S. Pat. No. 6,304,489 and U.S. Pat. No. 6,849,992 for general techniques for introducing transgenes into mammals), in plants or parts of plants including but not limited to their leaves, flowers, fruits, seed, roots or tubers (for example in tobacco, maize, soybean or alfalfa) or in for example pupae of the silkworm Bombix mori.

[0808] Furthermore, the amino acid sequences, Nanobodies and polypeptides of the invention can also be expressed and/or produced in cell-free expression systems, and suitable examples of such systems will be clear to the skilled person. Some preferred, but non-limiting examples include expression in the wheat germ system; in rabbit reticulocyte lysates; or in the E. coli Zubay system.

[0809] As mentioned above, one of the advantages of the use of Nanobodies is that the polypeptides based thereon can be prepared through expression in a suitable bacterial system, and suitable bacterial expression systems, vectors, host cells, regulatory elements, etc., will be clear to the skilled person, for example from the references cited above. It should however be noted that the invention in its broadest sense is not limited to expression in bacterial systems.

[0810] Preferably, in the invention, an (in vivo or in vitro) expression system, such as a bacterial expression system, is used that provides the polypeptides of the invention in a form that is suitable for pharmaceutical use, and such expression systems will again be clear to the skilled person. As also will be clear to the skilled person, polypeptides of the invention suitable for pharmaceutical use can be prepared using techniques for peptide synthesis.

[0811] For production on industrial scale, preferred heterologous hosts for the (industrial) production of Nanobodies or Nanobody-containing protein therapeutics include strains of E. coli, Pichia pastoris, S. cerevisiae that are suitable for large scale expression/production/fermentation, and in particular for large scale pharmaceutical (i.e. GMP grade) expression/production/fermentation. Suitable examples of such strains will be clear to the skilled person. Such strains and production/expression systems are also made available by companies such as Biovitrum (Uppsala, Sweden).

[0812] Alternatively, mammalian cell lines, in particular Chinese hamster ovary (CHO) cells, can be used for large scale expression/production/fermentation, and in particular for large scale pharmaceutical expression/production/fermentation. Again, such expression/production systems are also made available by some of the companies mentioned above.

[0813] The choice of the specific expression system would depend in part on the requirement for certain post-translational modifications, more specifically glycosylation. The production of a Nanobody-containing recombinant protein for which glycosylation is desired or required would necessitate the use of mammalian expression hosts that have the ability to glycosylate the expressed protein. In this respect, it will be clear to the skilled person that the glycosylation pattern obtained (i.e. the kind, number and position of residues attached) will depend on the cell or cell line that is used for the expression. Preferably, either a human cell or cell line is used (i.e. leading to a protein that essentially has a human glycosylation pattern) or another mammalian cell line is used that can provide a glycosylation pattern that is essentially and/or functionally the same as human glycosylation or at least mimics human glycosylation. Generally, prokaryotic hosts such as E. coli do not have the ability to glycosylate proteins, and the use of lower eukaryotes such as yeast usually leads to a glycosylation pattern that differs from human glycosylation. Nevertheless, it should be understood that all the foregoing host cells and expression systems can be used in the invention, depending on the desired amino acid sequence, Nanobody or polypeptide to be obtained.

[0814] Thus, according to one non-limiting aspect of the invention, the amino acid sequence, Nanobody or polypeptide of the invention is glycosylated. According to another non-limiting aspect of the invention, the amino acid sequence, Nanobody or polypeptide of the invention is non-glycosylated.

[0815] According to one preferred, but non-limiting aspect of the invention, the amino acid sequence, Nanobody or polypeptide of the invention is produced in a bacterial cell, in particular a bacterial cell suitable for large scale pharmaceutical production, such as cells of the strains mentioned above.

[0816] According to another preferred, but non-limiting aspect of the invention, the amino acid sequence, Nanobody or polypeptide of the invention is produced in a yeast cell, in particular a yeast cell suitable for large scale pharmaceutical production, such as cells of the species mentioned above.

[0817] According to yet another preferred, but non-limiting aspect of the invention, the amino acid sequence, Nanobody or polypeptide of the invention is produced in a mammalian cell, in particular in a human cell or in a cell of a human cell line, and more in particular in a human cell or in a cell of a human cell line that is suitable for large scale pharmaceutical production, such as the cell lines mentioned hereinabove.

[0818] When expression in a host cell is used to produce the amino acid sequences, Nanobodies and the polypeptides of the invention, the amino acid sequences, Nanobodies and polypeptides of the invention can be produced either intracellullarly (e.g. in the cytosol, in the periplasma or in inclusion bodies) and then isolated from the host cells and optionally further purified; or can be produced extracellularly (e.g. in the medium in which the host cells are cultured) and then isolated from the culture medium and optionally further purified. When eukaryotic host cells are used, extracellular production is usually preferred since this considerably facilitates the further isolation and downstream processing of the Nanobodies and proteins obtained. Bacterial cells such as the strains of E. coli mentioned above normally do not secrete proteins extracellularly, except for a few classes of proteins such as toxins and hemolysin, and secretory production in E. coli refers to the translocation of proteins across the inner membrane to the periplasmic space. Periplasmic production provides several advantages over cytosolic production. For example, the N-terminal amino acid sequence of the secreted product can be identical to the natural gene product after cleavage of the secretion signal sequence by a specific signal peptidase. Also, there appears to be much less protease activity in the periplasm than in the cytoplasm. In addition, protein purification is simpler due to fewer contaminating proteins in the periplasm. Another advantage is that correct disulfide bonds may form because the periplasm provides a more oxidative environment than the cytoplasm. Proteins overexpressed in E. coli are often found in insoluble aggregates, so-called inclusion bodies. These inclusion bodies may be located in the cytosol or in the periplasm; the recovery of biologically active proteins from these inclusion bodies requires a denaturation/refolding process. Many recombinant proteins, including therapeutic proteins, are recovered from inclusion bodies. Alternatively, as will be clear to the skilled person, recombinant strains of bacteria that have been genetically modified so as to secrete a desired protein, and in particular an amino acid sequence, Nanobody or a polypeptide of the invention, can be used.

[0819] Thus, according to one non-limiting aspect of the invention, the amino acid sequence, Nanobody or polypeptide of the invention is an amino acid sequence, Nanobody or polypeptide that has been produced intracellularly and that has been isolated from the host cell, and in particular from a bacterial cell or from an inclusion body in a bacterial cell.

[0820] According to another non-limiting aspect of the invention, the amino acid sequence, Nanobody or polypeptide of the invention is an amino acid sequence, Nanobody or polypeptide that has been produced extracellularly, and that has been isolated from the medium in which the host cell is cultivated.

[0821] Some preferred, but non-limiting promoters for use with these host cells include,
[0822] for expression in E. coli: lac promoter (and derivatives thereof such as the lacUV5 promoter); arabinose promoter; left- (PL) and rightward (PR) promoter of phage lambda; promoter of the trp operon; hybrid lac/trp promoters (tac and trc); T7-promoter (more specifically that of T7-phage gene 10) and other T-phage promoters; promoter of the Tn10 tetracycline resistance gene; engineered variants of the above promoters that include one or more copies of an extraneous regulatory operator sequence;
[0823] for expression in S. cerevisiae: constitutive: ADH1 (alcohol dehydrogenase 1), ENO (enolase), CYC1 (cytochrome c iso-1), GAPDH (glyceraldehydes-3-phosphate dehydrogenase), PGK1 (phosphoglycerate kinase), PYK1 (pyruvate kinase); regulated: GAL1,10,7 (galactose metabolic enzymes), ADH2 (alcohol dehydrogenase 2), PHO5 (acid phosphatase), CUP1 (copper metallothionein); heterologous: CaMV (cauliflower mosaic virus 35S promoter);
[0824] for expression in Pichia pastoris: the AOX1 promoter (alcohol oxidase I);
[0825] for expression in mammalian cells: human cytomegalovirus (hCMV) immediate early enhancer/promoter; human cytomegalovirus (hCMV) immediate early promoter variant that contains two tetracycline operator sequences such that the promoter can be regulated by the Tet repressor; Herpes Simplex Virus thymidine kinase (TK) promoter; Rous Sarcoma Virus long terminal repeat (RSV LTR) enhancer/promoter; elongation factor 1α (hEF-1α) promoter from human, chimpanzee, mouse or rat; the SV40 early promoter; HIV-1 long terminal repeat promoter; β-actin promoter;

[0826] Some preferred, but non-limiting vectors for use with these host cells include:
[0827] vectors for expression in mammalian cells: pMAMneo (Clontech), pcDNA3 (Invitrogen), pMC1neo (Stratagene), pSG5 (Stratagene), EBO-pSV2-neo (ATCC 37593), pBPV-1 (8-2) (ATCC 37110), pdBPV-MMTneo (342-12) (ATCC 37224), pRSVgpt (ATCC37199), pRSVneo (ATCC37198), pSV2-dhfr (ATCC 37146), pUCTag (ATCC 37460) and 1ZD35 (ATCC 37565), as well as viral-based expression systems, such as those based on adenovirus;
[0828] vectors for expression in bacterial cells: pET vectors (Novagen) and pQE vectors (Qiagen);
[0829] vectors for expression in yeast or other fungal cells: pYES2 (Invitrogen) and Pichia expression vectors (Invitrogen);
[0830] vectors for expression in insect cells: pBlueBacII (Invitrogen) and other baculovirus vectors
[0831] vectors for expression in plants or plant cells: for example vectors based on cauliflower mosaic virus or tobacco mosaic virus, suitable strains of Agrobacterium, or Ti-plasmid based vectors.

[0832] Some preferred, but non-limiting secretory sequences for use with these host cells include:
[0833] for use in bacterial cells such as E. coli: PelB, Bla, OmpA, OmpC, OmpF, OmpT, StII, PhoA, PhoE, MalE, Lpp, LamB, and the like; TAT signal peptide, hemolysin C-terminal secretion signal;
[0834] for use in yeast: α-mating factor prepro-sequence, phosphatase (pho1), invertase (Suc), etc.;
[0835] for use in mammalian cells: indigenous signal in case the target protein is of eukaryotic origin; murine Ig κ-chain V-J2-C signal peptide; etc.

[0836] Suitable techniques for transforming a host or host cell of the invention will be clear to the skilled person and may depend on the intended host cell/host organism and the genetic construct to be used. Reference is again made to the handbooks and patent applications mentioned above.

[0837] After transformation, a step for detecting and selecting those host cells or host organisms that have been successfully transformed with the nucleotide sequence/genetic construct of the invention may be performed. This may for instance be a selection step based on a selectable marker present in the genetic construct of the invention or a step involving the detection of the amino acid sequence of the invention, e.g. using specific antibodies.

[0838] The transformed host cell (which may be in the form or a stable cell line) or host organisms (which may be in the form of a stable mutant line or strain) form further aspects of the present invention.

[0839] Preferably, these host cells or host organisms are such that they express, or are (at least) capable of expressing (e.g. under suitable conditions), an amino acid sequence, Nanobody or polypeptide of the invention (and in case of a host organism: in at least one cell, part, tissue or organ thereof). The invention also includes further generations, progeny and/or offspring of the host cell or host organism of the invention, that may for instance be obtained by cell division or by sexual or asexual reproduction.

[0840] To produce/obtain expression of the amino acid sequences of the invention, the transformed host cell or transformed host organism may generally be kept, maintained and/or cultured under conditions such that the (desired) amino acid sequence, Nanobody or polypeptide of the invention is expressed/produced. Suitable conditions will be clear to the skilled person and will usually depend upon the host cell/host organism used, as well as on the regulatory elements that control the expression of the (relevant) nucleotide sequence of the invention. Again, reference is made to the handbooks and patent applications mentioned above in the paragraphs on the genetic constructs of the invention.

[0841] Generally, suitable conditions may include the use of a suitable medium, the presence of a suitable source of food and/or suitable nutrients, the use of a suitable temperature, and optionally the presence of a suitable inducing factor or compound (e.g. when the nucleotide sequences of the invention are under the control of an inducible promoter); all of which may be selected by the skilled person. Again, under such conditions, the amino acid sequences of the invention may be expressed in a constitutive manner, in a transient manner, or only when suitably induced.

[0842] It will also be clear to the skilled person that the amino acid sequence, Nanobody or polypeptide of the invention may (first) be generated in an immature form (as mentioned above), which may then be subjected to post-translational modification, depending on the host cell/host organism used. Also, the amino acid sequence, Nanobody or polypeptide of the invention may be glycosylated, again depending on the host cell/host organism used.

[0843] The amino acid sequence, Nanobody or polypeptide of the invention may then be isolated from the host cell/host organism and/or from the medium in which said host cell or host organism was cultivated, using protein isolation and/or purification techniques known per se, such as (preparative) chromatography and/or electrophoresis techniques, differential precipitation techniques, affinity techniques (e.g. using a specific, cleavable amino acid sequence fused with the amino acid sequence, Nanobody or polypeptide of the invention) and/or preparative immunological techniques (i.e. using antibodies against the amino acid sequence to be isolated).

[0844] Generally, for pharmaceutical use, the polypeptides of the invention may be formulated as a pharmaceutical preparation or compositions comprising at least one polypeptide of the invention and at least one pharmaceutically acceptable carrier, diluent or excipient and/or adjuvant, and optionally one or more further pharmaceutically active polypeptides and/or compounds. By means of non-limiting examples, such a formulation may be in a form suitable for oral administration, for parenteral administration (such as by intravenous, intramuscular or subcutaneous injection or intravenous infusion), for topical administration, for administration by inhalation, by a skin patch, by an implant, by a suppository, etc. Such suitable administration forms—which may be solid, semi-solid or liquid, depending on the manner of administration—as well as methods and carriers for use in the preparation thereof, will be clear to the skilled person, and are further described herein.

[0845] Thus, in a further aspect, the invention relates to a pharmaceutical composition that contains at least one amino acid of the invention, at least one Nanobody of the invention or at least one polypeptide of the invention and at least one suitable carrier, diluent or excipient (i.e. suitable for pharmaceutical use), and optionally one or more further active substances.

[0846] Generally, the amino acid sequences, Nanobodies and polypeptides of the invention can be formulated and administered in any suitable manner known per se, for which reference is for example made to the general background art cited above (and in particular to WO 04/041862, WO 04/041863, WO 04/041865, WO 04/041867 and WO 08/020,079) as well as to the standard handbooks, such as Remington's Pharmaceutical Sciences, 18^{th} Ed., Mack Publishing Company, USA (1990) or Remington, the Science and Practice of Pharmacy, 21st Edition, Lippincott Williams and Wilkins (2005); or the Handbook of Therapeutic Antibodies (S. Dubel, Ed.), Wiley, Weinheim, 2007 (see for example pages 252-255).

[0847] For example, the amino acid sequences, Nanobodies and polypeptides of the invention may be formulated and administered in any manner known per se for conventional antibodies and antibody fragments (including ScFv's and diabodies) and other pharmaceutically active proteins. Such formulations and methods for preparing the same will be clear to the skilled person, and for example include preparations suitable for parenteral administration (for example intravenous, intraperitoneal, subcutaneous, intramuscular, intraluminal, intra-arterial or intrathecal administration) or for topical (i.e. transdermal or intradermal) administration.

[0848] Preparations for parenteral administration may for example be sterile solutions, suspensions, dispersions or emulsions that are suitable for infusion or injection. Suitable carriers or diluents for such preparations for example include, without limitation, sterile water and aqueous buffers and solutions such as physiological phosphate-buffered saline, Ringer's solutions, dextrose solution, and Hank's solution; water oils; glycerol; ethanol; glycols such as propylene glycol or as well as mineral oils, animal oils and vegetable oils, for example peanut oil, soybean oil, as well as suitable mixtures thereof. Usually, aqueous solutions or suspensions will be preferred.

[0849] The amino acid sequences, Nanobodies and polypeptides of the invention can also be administered using gene therapy methods of delivery. See, e.g., U.S. Pat. No. 5,399,346, which is incorporated by reference in its entirety. Using a gene therapy method of delivery, primary cells transfected with the gene encoding an amino acid sequence, Nanobody or polypeptide of the invention can additionally be transfected with tissue specific promoters to target specific organs, tissue, grafts, tumors, or cells and can additionally be transfected with signal and stabilization sequences for subcellularly localized expression.

[0850] Thus, the amino acid sequences, Nanobodies and polypeptides of the invention may be systemically administered, e.g., orally, in combination with a pharmaceutically acceptable vehicle such as an inert diluent or an assimilable edible carrier. They may be enclosed in hard or soft shell gelatin capsules, may be compressed into tablets, or may be incorporated directly with the food of the patient's diet. For oral therapeutic administration, the amino acid sequences, Nanobodies and polypeptides of the invention may be combined with one or more excipients and used in the form of ingestible tablets, buccal tablets, troches, capsules, elixirs, suspensions, syrups, wafers, and the like. Such compositions and preparations should contain at least 0.1% of the amino acid sequence, Nanobody or polypeptide of the invention. Their percentage in the compositions and preparations may, of course, be varied and may conveniently be between about 2 to about 60% of the weight of a given unit dosage form. The amount of the amino acid sequence, Nanobody or polypeptide of the invention in such therapeutically useful compositions is such that an effective dosage level will be obtained.

[0851] The tablets, troches, pills, capsules, and the like may also contain the following: binders such as gum tragacanth, acacia, corn starch or gelatin; excipients such as dicalcium phosphate; a disintegrating agent such as corn starch, potato starch, alginic acid and the like; a lubricant such as magnesium stearate; and a sweetening agent such as sucrose, fructose, lactose or aspartame or a flavoring agent such as peppermint, oil of wintergreen, or cherry flavoring may be added. When the unit dosage form is a capsule, it may contain, in addition to materials of the above type, a liquid carrier, such as a vegetable oil or a polyethylene glycol. Various other materials may be present as coatings or to otherwise modify the physical form of the solid unit dosage form. For instance, tablets, pills, or capsules may be coated with gelatin, wax, shellac or sugar and the like. A syrup or elixir may contain the amino acid sequences, Nanobodies and polypeptides of the invention, sucrose or fructose as a sweetening agent, methyl and propylparabens as preservatives, a dye and flavoring such as cherry or orange flavor. Of course, any material used in preparing any unit dosage form should be pharmaceutically acceptable and substantially non-toxic in the amounts employed. In addition, the amino acid sequences, Nanobodies and polypeptides of the invention may be incorporated into sustained-release preparations and devices.

[0852] Preparations and formulations for oral administration may also be provided with an enteric coating that will allow the constructs of the invention to resist the gastric environment and pass into the intestines. More generally, preparations and formulations for oral administration may be suitably formulated for delivery into any desired part of the gastrointestinal tract. In addition, suitable suppositories may be used for delivery into the gastrointestinal tract.

[0853] The amino acid sequences, Nanobodies and polypeptides of the invention may also be administered intravenously or intraperitoneally by infusion or injection. Solutions of the amino acid sequences, Nanobodies and polypeptides of the invention or their salts can be prepared in water, optionally mixed with a nontoxic surfactant. Dispersions can also be prepared in glycerol, liquid polyethylene glycols, triacetin, and mixtures thereof and in oils. Under ordinary conditions of storage and use, these preparations contain a preservative to prevent the growth of microorganisms.

[0854] The pharmaceutical dosage forms suitable for injection or infusion can include sterile aqueous solutions or dispersions or sterile powders comprising the active ingredient which are adapted for the extemporaneous preparation of sterile injectable or infusible solutions or dispersions, optionally encapsulated in liposomes. In all cases, the ultimate dosage form must be sterile, fluid and stable under the conditions of manufacture and storage. The liquid carrier or vehicle can be a solvent or liquid dispersion medium comprising, for example, water, ethanol, a polyol (for example, glycerol, propylene glycol, liquid polyethylene glycols, and the like), vegetable oils, nontoxic glyceryl esters, and suitable mixtures thereof. The proper fluidity can be maintained, for example, by the formation of liposomes, by the maintenance of the required particle size in the case of dispersions or by the use of surfactants. The prevention of the action of microorganisms can be brought about by various antibacterial and antifungal agents, for example, parabens, chlorobutanol, phenol, sorbic acid, thimerosal, and the like. In many cases, it will be preferable to include isotonic agents, for example, sugars, buffers or sodium chloride. Prolonged absorption of the injectable compositions can be brought about by the use in the compositions of agents delaying absorption, for example, aluminum monostearate and gelatin.

[0855] Sterile injectable solutions are prepared by incorporating the amino acid sequences, Nanobodies and polypeptides of the invention in the required amount in the appropriate solvent with various of the other ingredients enumerated above, as required, followed by filter sterilization. In the case of sterile powders for the preparation of sterile injectable solutions, the preferred methods of preparation are vacuum drying and the freeze drying techniques, which yield a powder of the active ingredient plus any additional desired ingredient present in the previously sterile-filtered solutions.

[0856] For topical administration, the amino acid sequences, Nanobodies and polypeptides of the invention may be applied in pure form, i.e., when they are liquids. However, it will generally be desirable to administer them to the skin as compositions or formulations, in combination with a dermatologically acceptable carrier, which may be a solid or a liquid.

[0857] Useful solid carriers include finely divided solids such as talc, clay, microcrystalline cellulose, silica, alumina and the like. Useful liquid carriers include water, hydroxyalkyls or glycols or water-alcohol/glycol blends, in which the amino acid sequences, Nanobodies and polypeptides of the invention can be dissolved or dispersed at effective levels, optionally with the aid of non-toxic surfactants. Adjuvants such as fragrances and additional antimicrobial agents can be added to optimize the properties for a given use. The resultant liquid compositions can be applied from absorbent pads, used to impregnate bandages and other dressings, or sprayed onto the affected area using pump-type or aerosol sprayers.

[0858] Thickeners such as synthetic polymers, fatty acids, fatty acid salts and esters, fatty alcohols, modified celluloses or modified mineral materials can also be employed with liquid carriers to form spreadable pastes, gels, ointments, soaps, and the like, for application directly to the skin of the user.

[0859] Examples of useful dermatological compositions which can be used to deliver the amino acid sequences, Nanobodies and polypeptides of the invention to the skin are known to the art; for example, see Jacquet et al. (U.S. Pat. No. 4,608,392), Geria (U.S. Pat. No. 4,992,478), Smith et al. (U.S. Pat. No. 4,559,157) and Wortzman (U.S. Pat. No. 4,820,508).

[0860] Useful dosages of the amino acid sequences, Nanobodies and polypeptides of the invention can be determined by comparing their in vitro activity, and in vivo activity in animal models. Methods for the extrapolation of effective dosages in mice, and other animals, to humans are known to the art; for example, see U.S. Pat. No. 4,938,949.

[0861] Generally, the concentration of the amino acid sequences, Nanobodies and polypeptides of the invention in a liquid composition, such as a lotion, will be from about 0.1-25 wt-%, preferably from about 0.5-10 wt-%. The concentration in a semi-solid or solid composition such as a gel or a powder will be about 0.1-5 wt-%, preferably about 0.5-2.5 wt-%.

[0862] The amount of the amino acid sequences, Nanobodies and polypeptides of the invention required for use in treatment will vary not only with the particular amino acid sequence, Nanobody or polypeptide selected but also with the route of administration, the nature of the condition being treated and the age and condition of the patient and will be ultimately at the discretion of the attendant physician or clinician. Also the dosage of the amino acid sequences, Nanobodies and polypeptides of the invention varies depending on the target cell, tumor, tissue, graft, or organ.

[0863] The desired dose may conveniently be presented in a single dose or as divided doses administered at appropriate intervals, for example, as two, three, four or more sub-doses per day. The sub-dose itself may be further divided, e.g., into a number of discrete loosely spaced administrations; such as multiple inhalations from an insufflator or by application of a plurality of drops into the eye.

[0864] An administration regimen could include long-term, daily treatment. By “long-term” is meant at least two weeks and preferably, several weeks, months, or years of duration. Necessary modifications in this dosage range may be determined by one of ordinary skill in the art using only routine experimentation given the teachings herein. See Remington's Pharmaceutical Sciences (Martin, E. W., ed. 4), Mack Publishing Co., Easton, Pa. The dosage can also be adjusted by the individual physician in the event of any complication.

[0865] In another aspect, the invention relates to a method for the prevention and/or treatment of at least one bone disease or disorder, said method comprising administering, to a subject in need thereof, a pharmaceutically active amount of an amino acid sequence of the invention, of a Nanobody of the invention, of a polypeptide of the invention, and/or of a pharmaceutical composition comprising the same.

[0866] In the context of the present invention, the term “prevention and/or treatment” not only comprises preventing and/or treating the disease, but also generally comprises preventing the onset of the disease, slowing or reversing the progress of disease, preventing or slowing the onset of one or more symptoms associated with the disease, reducing and/or alleviating one or more symptoms associated with the disease, reducing the severity and/or the duration of the disease and/or of any symptoms associated therewith and/or preventing a further increase in the severity of the disease and/or of any symptoms associated therewith, preventing, reducing or reversing any physiological damage caused by the disease, and generally any pharmacological action that is beneficial to the patient being treated.

[0867] The subject to be treated may be any warm-blooded animal, but is in particular a mammal, and more in particular a human being. As will be clear to the skilled person, the subject to be treated will in particular be a person suffering from, or at risk of, the diseases and disorders mentioned herein.

[0868] The invention relates to a method for the prevention and/or treatment of at least one disease or disorder that is associated with RANK-L, with its biological or pharmacological activity, and/or with the biological pathways or signalling in which RANK-L is involved, said method comprising administering, to a subject in need thereof, a pharmaceutically active amount of an amino acid sequence of the invention, of a Nanobody of the invention, of a polypeptide of the invention, and/or of a pharmaceutical composition comprising the same. In particular, the invention relates to a method for the prevention and/or treatment of at least one disease or disorder that can be treated by modulating RANK-L, its biological or pharmacological activity, and/or the biological pathways or signalling in which RANK-L is involved, said method comprising administering, to a subject in need thereof, a pharmaceutically active amount of an amino acid sequence of the invention, of a Nanobody of the invention, of a polypeptide of the invention, and/or of a pharmaceutical composition comprising the same. In particular, said pharmaceutically effective amount may be an amount that is sufficient to modulate RANK-L, its biological or pharmacological activity, and/or the biological pathways or signalling in which RANK-L is involved; and/or an amount that provides a level of the amino acid sequence of the invention, of a Nanobody of the invention, of a polypeptide of the invention in the circulation that is sufficient to modulate RANK-L, its biological or pharmacological activity, and/or the biological pathways or signalling in which RANK-L is involved.

[0869] The invention furthermore relates to a method for the prevention and/or treatment of at least one disease or disorder that can be prevented and/or treated by administering an amino acid sequence of the invention, a Nanobody of the invention or a polypeptide of the invention to a patient, said method comprising administering, to a subject in need thereof, a pharmaceutically active amount of an amino acid sequence of the invention, of a Nanobody of the invention, of a polypeptide of the invention, and/or of a pharmaceutical composition comprising the same.

[0870] More in particular, the invention relates to a method for the prevention and/or treatment of at least one disease or disorder chosen from the group consisting of the diseases and disorders listed herein, said method comprising administering, to a subject in need thereof, a pharmaceutically active amount of an amino acid sequence of the invention, of a Nanobody of the invention, of a polypeptide of the invention, and/or of a pharmaceutical composition comprising the same.

[0871] In another aspect, the invention relates to a method for immunotherapy, and in particular for passive immunotherapy, which method comprises administering, to a subject suffering from or at risk of the diseases and disorders mentioned herein, a pharmaceutically active amount of an amino acid sequence of the invention, of a Nanobody of the invention, of a polypeptide of the invention, and/or of a pharmaceutical composition comprising the same.

[0872] In the above methods, the amino acid sequences, Nanobodies and/or polypeptides of the invention and/or the compositions comprising the same can be administered in any suitable manner, depending on the specific pharmaceutical formulation or composition to be used. Thus, the amino acid sequences, Nanobodies and/or polypeptides of the invention and/or the compositions comprising the same can for example be administered orally, intraperitoneally (e.g. intravenously, subcutaneously, intramuscularly, or via any other route of administration that circumvents the gastrointestinal tract), intranasally, transdermally, topically, by means of a suppository, by inhalation, again depending on the specific pharmaceutical formulation or composition to be used. The clinician will be able to select a suitable route of administration and a suitable pharmaceutical formulation or composition to be used in such administration, depending on the disease or disorder to be prevented or treated and other factors well known to the clinician.

[0873] The amino acid sequences, Nanobodies and/or polypeptides of the invention and/or the compositions comprising the same are administered according to a regime of treatment that is suitable for preventing and/or treating the disease or disorder to be prevented or treated. The clinician will generally be able to determine a suitable treatment regimen, depending on factors such as the disease or disorder to be prevented or treated, the severity of the disease to be treated and/or the severity of the symptoms thereof, the specific amino acid sequence, Nanobody or polypeptide of the invention to be used, the specific route of administration and pharmaceutical formulation or composition to be used, the age, gender, weight, diet, general condition of the patient, and similar factors well known to the clinician.

[0874] Generally, the treatment regimen will comprise the administration of one or more amino acid sequences, Nanobodies and/or polypeptides of the invention, or of one or more compositions comprising the same, in one or more pharmaceutically effective amounts or doses. The specific amount(s) or doses to administer can be determined by the clinician, again based on the factors cited above.

[0875] Generally, for the prevention and/or treatment of the diseases and disorders mentioned herein and depending on the specific disease or disorder to be treated, the potency of the specific amino acid sequence, Nanobody and polypeptide of the invention to be used, the specific route of administration and the specific pharmaceutical formulation or composition used, the amino acid sequences, Nanobodies and polypeptides of the invention will generally be administered in an amount between 1 gram and 0.01 microgram per kg body weight per day, preferably between 0.1 gram and 0.1 microgram per kg body weight per day, such as about 1, 10, 100 or 1000 microgram per kg body weight per day, either continuously (e.g. by infusion), as a single daily dose or as multiple divided doses during the day. The clinician will generally be able to determine a suitable daily dose, depending on the factors mentioned herein. It will also be clear that in specific cases, the clinician may choose to deviate from these amounts, for example on the basis of the factors cited above and his expert judgment. Generally, some guidance on the amounts to be administered can be obtained from the amounts usually administered for comparable conventional antibodies or antibody fragments against the same target administered via essentially the same route, taking into account however differences in affinity/avidity, efficacy, biodistribution, half-life and similar factors well known to the skilled person.

[0876] Usually, in the above method, a single amino acid sequence, Nanobody or polypeptide of the invention will be used. It is however within the scope of the invention to use two or more amino acid sequences, Nanobodies and/or polypeptides of the invention in combination.

[0877] The Nanobodies, amino acid sequences and polypeptides of the invention may also be used in combination with one or more further pharmaceutically active compounds or principles, i.e. as a combined treatment regimen, which may or may not lead to a synergistic effect. Again, the clinician will be able to select such further compounds or principles, as well as a suitable combined treatment regimen, based on the factors cited above and his expert judgement.

[0878] In particular, the amino acid sequences, Nanobodies and polypeptides of the invention may be used in combination with other pharmaceutically active compounds or principles that are or can be used for the prevention and/or treatment of the diseases and disorders cited herein, as a result of which a synergistic effect may or may not be obtained. Examples of such compounds and principles, as well as routes, methods and pharmaceutical formulations or compositions for administering them will be clear to the clinician.

[0879] In particular, the pharmaceutical composition of the invention may comprise one or more amino acid sequences, Nanobodies and/or polypeptides of the invention and at least one additional therapeutic agent selected from a bone morphogenic factor, transforming growth factor-β (TGF-β), an interleukin-1 (IL-1) inhibitor, IL-1ra, Kineret™, a TNFα inhibitor, a soluble TNFα receptor, Enbrel™, an anti-TNFα antibody, Remicade™, a D2E7 antibody, a parathyroid hormone, an analog of a parathyroid hormone, a parathyroid hormone related protein, an analog of a parathyroid hormone related protein, a prostaglandin, a bisphosphonate, an alendronate, fluoride, calcium, a non-steroidal anti-inflammatory drug (NSAID), a COX-2 inhibitor, Celebrex™, Vioxx™, an immunosuppressant, methotrexate, leflunomide, a serine protease inhibitor, a secretory leukocyte protease inhibitor (SLPI), an IL-6 inhibitor, an antibody or Nanobody against IL-6, an IL-8 inhibitor, an antibody or Nanobody against IL-8, an IL-18 inhibitor, an IL-18 binding protein, an antibody or Nanobody against IL-18, an Interleukin-1 converting enzyme (ICE) modulator, a fibroblast growth factor (FGF), an FGF modulator, a PAF antagonist, a keratinocyte growth factor (KGF), a KGF-related molecule, a KGF modulator, a matrix metalloproteinase (MMP) modulator, a nitric oxide synthase (NOS) modulator, a modulator of glucocorticoid receptor, a modulator of glutamate receptor, a modulator of lipopolysaccharide (LPS) levels, a noradrenaline, a noradrenaline mimetic, and a noradrenaline modulator as described, for example, in US 2004/00335353

[0880] When two or more substances or principles are to be used as part of a combined treatment regimen, they can be administered via the same route of administration or via different routes of administration, at essentially the same time or at different times (e.g. essentially simultaneously, consecutively, or according to an alternating regime). When the substances or principles are to be administered simultaneously via the same route of administration, they may be administered as different pharmaceutical formulations or compositions or part of a combined pharmaceutical formulation or composition, as will be clear to the skilled person.

[0881] Also, when two or more active substances or principles are to be used as part of a combined treatment regimen, each of the substances or principles may be administered in the same amount and according to the same regimen as used when the compound or principle is used on its own, and such combined use may or may not lead to a synergistic effect. However, when the combined use of the two or more active substances or principles leads to a synergistic effect, it may also be possible to reduce the amount of one, more or all of the substances or principles to be administered, while still achieving the desired therapeutic action. This may for example be useful for avoiding, limiting or reducing any unwanted side-effects that are associated with the use of one or more of the substances or principles when they are used in their usual amounts, while still obtaining the desired pharmaceutical or therapeutic effect.

[0882] The effectiveness of the treatment regimen used according to the invention may be determined and/or followed in any manner known per se for the disease or disorder involved, as will be clear to the clinician. The clinician will also be able, where appropriate and on a case-by-case basis, to change or modify a particular treatment regimen, so as to achieve the desired therapeutic effect, to avoid, limit or reduce unwanted side-effects, and/or to achieve an appropriate balance between achieving the desired therapeutic effect on the one hand and avoiding, limiting or reducing undesired side effects on the other hand.

[0883] Generally, the treatment regimen will be followed until the desired therapeutic effect is achieved and/or for as long as the desired therapeutic effect is to be maintained. Again, this can be determined by the clinician.

[0884] In another aspect, the invention relates to the use of an amino acid sequence, Nanobody or polypeptide of the invention in the preparation of a pharmaceutical composition for prevention and/or treatment of at least one bone disease or disorder; and/or for use in one or more of the methods of treatment mentioned herein.

[0885] The subject to be treated may be any warm-blooded animal, but is in particular a mammal, and more in particular a human being. As will be clear to the skilled person, the subject to be treated will in particular be a person suffering from, or at risk of, the diseases and disorders mentioned herein.

[0886] The invention also relates to the use of an amino acid sequence, Nanobody or polypeptide of the invention in the preparation of a pharmaceutical composition for the prevention and/or treatment of at least one disease or disorder that can be prevented and/or treated by administering an amino acid sequence, Nanobody or polypeptide of the invention to a patient.

[0887] More in particular, the invention relates to the use of an amino acid sequence, Nanobody or polypeptide of the invention in the preparation of a pharmaceutical composition for the prevention and/or treatment of bone diseases and disorders, and in particular for the prevention and treatment of one or more of the diseases and disorders listed herein.

[0888] Again, in such a pharmaceutical composition, the one or more amino acid sequences, Nanobodies or polypeptides of the invention may also be suitably combined with one or more other active principles, such as those mentioned herein.

[0889] Finally, although the use of the Nanobodies of the invention (as defined herein) and of the polypeptides of the invention is much preferred, it will be clear that on the basis of the description herein, the skilled person will also be able to design and/or generate, in an analogous manner, other amino acid sequences and in particular (single) domain antibodies against RANK-L, as well as polypeptides comprising such (single) domain antibodies.

[0890] For example, it will also be clear to the skilled person that it may be possible to “graft” one or more of the CDR's mentioned above for the Nanobodies of the invention onto such (single) domain antibodies or other protein scaffolds, including but not limited to human scaffolds or non-immunoglobulin scaffolds. Suitable scaffolds and techniques for such CDR grafting will be clear to the skilled person and are well known in the art, see for example U.S. Pat. No. 7,180,370, WO 01/27160, EP 0 605 522, EP 0 460 167, U.S. Pat. No. 7,054,297, Nicaise et al., Protein Science (2004), 13:1882-1891; Ewert et al., Methods, 2004 October; 34(2):184-199; Kettleborough et al., Protein Eng. 1991 October; 4(7): 773-783; O'Brien and Jones, Methods Mol. Biol. 2003:207:81-100; Skerra, J. Mol. Recognit. 2000:13:167-187, and Saerens et al., J. Mol. Biol. 2005 Sep. 23; 352(3):597-607, and the further references cited therein. For example, techniques known per se for grafting mouse or rat CDR's onto human frameworks and scaffolds can be used in an analogous manner to provide chimeric proteins comprising one or more of the CDR's of the Nanobodies of the invention and one or more human framework regions or sequences.

[0891] It should also be noted that, when the Nanobodies of the inventions contain one or more other CDR sequences than the preferred CDR sequences mentioned above, these CDR sequences can be obtained in any manner known per se, for example from Nanobodies (preferred), V_{H} domains from conventional antibodies (and in particular from human antibodies), heavy chain antibodies, conventional 4-chain antibodies (such as conventional human 4-chain antibodies) or other immunoglobulin sequences directed against RANK-L. Such immunoglobulin sequences directed against RANK-L can be generated in any manner known per se, as will be clear to the skilled person, i.e. by immunization with RANK-L or by screening a suitable library of immunoglobulin sequences with RANK-L, or any suitable combination thereof. Optionally, this may be followed by techniques such as random or site-directed mutagenesis and/or other techniques for affinity maturation known per se. Suitable techniques for generating such immunoglobulin sequences will be clear to the skilled person, and for example include the screening techniques reviewed by Hoogenboom, Nature Biotechnology, 23, 9, 1105-1116 (2005). Other techniques for generating immunoglobulins against a specified target include for example the Nanoclone technology (as for example described in the published US patent application 2006-0211088), so-called SLAM technology (as for example described in the European patent application 0 542 810), the use of transgenic mice expressing human immunoglobulins or the well-known hybridoma techniques (see for example Larrick et al, Biotechnology, Vol. 7, 1989, p. 934). All these techniques can be used to generate immunoglobulins against RANK-L, and the CDR's of such immunoglobulins can be used in the Nanobodies of the invention, i.e. as outlined above. For example, the sequence of such a CDR can be determined, synthesized and/or isolated, and inserted into the sequence of a Nanobody of the invention (e.g. so as to replace the corresponding native CDR), all using techniques known per se such as those described herein, or Nanobodies of the invention containing such CDR's (or nucleic acids encoding the same) can be synthesized de novo, again using the techniques mentioned herein.

[0892] Further uses of the amino acid sequences, Nanobodies, polypeptides, nucleic acids, genetic constructs and hosts and host cells of the invention will be clear to the skilled person based on the disclosure herein. For example, and without limitation, the amino acid sequences of the invention can be linked to a suitable carrier or solid support so as to provide a medium than can be used in a manner known per se to purify RANK-L from compositions and preparations comprising the same. Derivatives of the amino acid sequences of the invention that comprise a suitable detectable label can also be used as markers to determine (qualitatively or quantitatively) the presence of RANK-L in a composition or preparation or as a marker to selectively detect the presence of RANK-L on the surface of a cell or tissue (for example, in combination with suitable cell sorting techniques).

[0893] The invention will now be further described by means of the following non-limiting preferred aspects, examples and figures:

### Preferred Aspects

[0894] 1. Amino acid sequence that is directed against and/or that can specifically bind to RANK-L.
[0895] 2. Amino acid sequence according to aspect 1, which is directed against and/or can specifically bind to the RANK receptor binding site on RANK-L.
[0896] 3. Amino acid sequence according to any of aspects 1 or 2, which is directed against and/or can specifically bind to the intersubunit receptor-binding grooves on the RANK-L trimer.
[0897] 4. Amino acid sequence according to any of aspects 1 to 3, which modulates binding of RANKL-L to RANK.
[0898] 5. Amino acid sequence according to aspect 4, which inhibits and/or prevents binding of RANKL-L to RANK.
[0899] 6. Amino acid sequence according to aspect 5, which inhibits and/or prevents binding of RANKL-L to RANK, while not reducing and/or inhibiting the RANK-L/OPG interaction.
[0900] 7. Amino acid sequence according to any of aspects 1 to 6, which is an antagonist of RANK-L
[0901] 8. Amino acid sequence according aspect 1, which is directed against and/or can specifically bind to the OPG binding site on RANK-L.
[0902] 9. Amino acid sequence according aspects 1 or 8, which modulates binding of RANKL-L to OPG.
[0903] 10. Amino acid sequence according to aspect 9, which inhibits and/or prevents the RANK/RANK-L interaction.
[0904] 11. Amino acid sequence according to aspect 10, which is an antagonist of RANK-L.
[0905] 12. Amino acid sequence according to aspect 8, which does not reduce or inhibit the RANK/RANK-L interaction.
[0906] 13. Amino acid sequence according to aspect 12, which is an agonist of RANK-L.
[0907] 14. Amino acid sequence according to aspect 1, which prevents and/or inhibits the formation of the RANK-L trimer.
[0908] 15. Amino acid sequence according to aspect 1, which prevents and/or inhibits the differentiation and/or proliferation of osteoclasts.
[0909] 16. Amino acid sequence according to aspect 1, which modulates bone remodelling.
[0910] 17. Amino acid sequence according to any of aspects 1 to 16, which does not bind TRAIL.
[0911] 18. Amino acid sequence according to any of aspects 1 to 17, which does not bind TNF-alpha.
[0912] 19. Amino acid sequence according to any of aspects 1 to 18, which does not bind CD40 ligand.
[0913] 20. Amino acid sequence according to any of aspects 1 to 19, which does not bind related TNF family members.
[0914] 21. Amino acid sequence according to any of aspects 1 to 20, that is in essentially isolated form.
[0915] 22. Amino acid sequence according to any of aspects 1 to 21, for administration to a subject, wherein said amino acid sequence does not naturally occur in said subject.
[0916] 23. Amino acid sequence according to any of the preceding aspects, that can specifically bind to RANK-L with a dissociation constant (K_{D}) of 10⁻⁵ to 10⁻¹² moles/litre or less, and preferably 10⁻⁷ to 10⁻¹² moles/litre or less and more preferably 10⁻⁸ to 10⁻¹² moles/litre.
[0917] 24. Amino acid sequence according to any of the preceding aspects, that can specifically bind to RANK-L with a rate of association (kₒₙ-rate) of between 10² M⁻¹s⁻¹ to about 10⁷ M⁻¹s⁻¹, preferably between 10³ M⁻¹s⁻¹ and 10⁷ M⁻¹s⁻¹, more preferably between 10⁴ M⁻¹s⁻¹ and 10⁷ M⁻¹s⁻¹, such as between 10⁵ M⁻¹s⁻¹ and 10⁷ M⁻¹s⁻¹.
[0918] 25. Amino acid sequence according to any of the preceding aspects, that can specifically bind to RANK-L with a rate of dissociation (k_{off} rate) between 1 s⁻¹ and 10⁻⁶ s⁻¹, preferably between 10⁻² s⁻¹ and 10⁻⁶ s⁻¹, more preferably between 10⁻³ s⁻¹ and 10⁻⁶ s⁻¹, such as between 10⁻⁴ s⁻¹ and 10⁻⁶ s⁻¹.
[0919] 26. Amino acid sequence according to any of the preceding aspects, that can specifically bind to RANK-L with an affinity less than 500 nM, preferably less than 200 nM, more preferably less than 10 nM, such as less than 500 pM.
[0920] 27. Amino acid sequence according to any of the preceding aspects, that is a naturally occurring amino acid sequence (from any suitable species) or a synthetic or semi-synthetic amino acid sequence.
[0921] 28. Amino acid sequence according to any of the preceding aspects, that comprises an immunoglobulin fold or that under suitable conditions is capable of forming an immunoglobulin fold.
[0922] 29. Amino acid sequence according to any of the preceding aspects, that essentially consists of 4 framework regions (FR1 to FR4 respectively) and 3 complementarity determining regions (CDR1 to CDR3 respectively).
[0923] 30. Amino acid sequence according to any of the preceding aspects, that is an immunoglobulin sequence.
[0924] 31. Amino acid sequence according to any of the preceding aspects, that is a naturally occurring immunoglobulin sequence (from any suitable species) or a synthetic or semi-synthetic immunoglobulin sequence.
[0925] 32. Amino acid sequence according to any of the preceding aspects that is a humanized immunoglobulin sequence, a camelized immunoglobulin sequence or an immunoglobulin sequence that has been obtained by techniques such as affinity maturation.
[0926] 33. Amino acid sequence according to any of the preceding aspects, that essentially consists of a light chain variable domain sequence (e.g. a V_{L}-sequence); or of a heavy chain variable domain sequence (e.g. a V_{H}-sequence).
[0927] 34. Amino acid sequence according to any of the preceding aspects, that essentially consists of a heavy chain variable domain sequence that is derived from a conventional four-chain antibody or that essentially consist of a heavy chain variable domain sequence that is derived from heavy chain antibody.
[0928] 35. Amino acid sequence according to any of the preceding aspects, that essentially consists of a domain antibody (or an amino acid sequence that is suitable for use as a domain antibody), of a single domain antibody (or an amino acid sequence that is suitable for use as a single domain antibody), of a “dAb” (or an amino acid sequence that is suitable for use as a dAb) or of a Nanobody (including but not limited to a V_{HH} sequence).
[0929] 36. Amino acid sequence according to any of the preceding aspects, that essentially consists of a Nanobody.
[0930] 37. Amino acid sequence according to any of the preceding aspects, that essentially consists of a Nanobody that
   [0931] i) has at least 80% amino acid identity with at least one of the amino acid sequences of SEQ ID NO's: 1 to 22, in which for the purposes of determining the degree of amino acid identity, the amino acid residues that form the CDR sequences are disregarded;

[0932] and in which:
[0933] ii) preferably one or more of the amino acid residues at positions 11, 37, 44, 45, 47, 83, 84, 103, 104 and 108 according to the Kabat numbering are chosen from the Hallmark residues mentioned in Table A-3.
[0934] 38. Amino acid sequence according to any of the preceding aspects, that essentially consists of a Nanobody that
   [0935] i) has at least 80% amino acid identity with at least one of the amino acid sequences of SEQ ID NO's: 560-621, in which for the purposes of determining the degree of amino acid identity, the amino acid residues that form the CDR sequences are disregarded;

[0936] and in which:
[0937] ii) preferably one or more of the amino acid residues at positions 11, 37, 44, 45, 47, 83, 84, 103, 104 and 108 according to the Kabat numbering are chosen from the Hallmark residues mentioned in Table A-3.
[0938] 39. Amino acid sequence according to any of the preceding aspects, that essentially consists of a polypeptide that
   [0939] i) has at least 80% amino acid identity with at least one of the amino acid sequences of SEQ ID NO's: 622-729, 759-762 and 766-773, in which for the purposes of determining the degree of amino acid identity, the amino acid residues that form the CDR sequences are disregarded;

[0940] and in which:
[0941] ii) preferably one or more of the amino acid residues at positions 11, 37, 44, 45, 47, 83, 84, 103, 104 and 108 according to the Kabat numbering are chosen from the Hallmark residues mentioned in Table A-3.
[0942] 40. Amino acid sequence according to any of the preceding aspects, that essentially consists of a humanized Nanobody.
[0943] 41. Amino acid sequence according to any of the preceding aspects, that in addition to the at least one binding site for binding against RANK-L, contains one or more further binding sites for binding against other antigens, proteins or targets.
[0944] 42. Amino acid sequence directed against RANK-L, that comprises one or more stretches of amino acid residues chosen from the group consisting of:
   [0945] a) the amino acid sequences of SEQ ID NO's: 188-249;
   [0946] b) amino acid sequences that have at least 80% amino acid identity with at least one of the amino acid sequences of SEQ ID NO's: 188-249;
   [0947] c) amino acid sequences that have 3, 2, or 1 amino acid difference with at least one of the amino acid sequences of SEQ ID NO's: 188-249;
   [0948] d) the amino acid sequences of SEQ ID NO's: 312-373 and 758;
   [0949] e) amino acid sequences that have at least 80% amino acid identity with at least one of the amino acid sequences of SEQ ID NO's: 312-373 and 758;
   [0950] f) amino acid sequences that have 3, 2, or 1 amino acid difference with at least one of the amino acid sequences of SEQ ID NO's: 312-373 and 758;
   [0951] g) the amino acid sequences of SEQ ID NO's: 436-497;
   [0952] h) amino acid sequences that have at least 80% amino acid identity with at least one of the amino acid sequences of SEQ ID NO's: 436-497;
   [0953] i) amino acid sequences that have 3, 2, or 1 amino acid difference with at least one of the amino acid sequences of SEQ ID NO's: 436-497;

[0954] or any suitable combination thereof.
[0955] 43. Amino acid sequence according to aspect 42, in which at least one of said stretches of amino acid residues forms part of the antigen binding site for binding against RANK-L.
[0956] 44. Amino acid sequence according to aspect 42, that comprises two or more stretches of amino acid residues chosen from the group consisting of:
   [0957] a) the amino acid sequences of SEQ ID NO's: 188-249;
   [0958] b) amino acid sequences that have at least 80% amino acid identity with at least one of the amino acid sequences of SEQ ID NO's: 188-249;
   [0959] c) amino acid sequences that have 3, 2, or 1 amino acid difference with at least one of the amino acid sequences of SEQ ID NO's: 188-249;
   [0960] d) the amino acid sequences of SEQ ID NO's: 312-373 and 758;
   [0961] e) amino acid sequences that have at least 80% amino acid identity with at least one of the amino acid sequences of SEQ ID NO's: 312-373 and 758;
   [0962] f) amino acid sequences that have 3, 2, or 1 amino acid difference with at least one of the amino acid sequences of SEQ ID NO's: 312-373 and 758;
   [0963] g) the amino acid sequences of SEQ ID NO's: 436-497;
   [0964] h) amino acid sequences that have at least 80% amino acid identity with at least one of the amino acid sequences of SEQ ID NO's: 436-497;
   [0965] i) amino acid sequences that have 3, 2, or 1 amino acid difference with at least one of the amino acid sequences of SEQ ID NO's: 439-497;
   [0966] such that (i) when the first stretch of amino acid residues corresponds to one of the amino acid sequences according to a), b) or c), the second stretch of amino acid residues corresponds to one of the amino acid sequences according to d), e), f), g), h) or i); (ii) when the first stretch of amino acid residues corresponds to one of the amino acid sequences according to d), e) or f), the second stretch of amino acid residues corresponds to one of the amino acid sequences according to a), b), c), g), h) or i); or (iii) when the first stretch of amino acid residues corresponds to one of the amino acid sequences according to g), h) or i), the second stretch of amino acid residues corresponds to one of the amino acid sequences according to a), b), c), d), e) or f).
[0967] 45. Amino acid sequence according to aspect 44, in which the at least two stretches of amino acid residues forms part of the antigen binding site for binding against RANK-L.
[0968] 46. Amino acid sequence according to any of aspects 42 to 44, that comprises three or more stretches of amino acid residues, in which the first stretch of amino acid residues is chosen from the group consisting of:
   [0969] a) the amino acid sequences of SEQ ID NO's: 188-249;
   [0970] b) amino acid sequences that have at least 80% amino acid identity with at least one of the amino acid sequences of SEQ ID NO's: 188-249;
   [0971] c) amino acid sequences that have 3, 2, or 1 amino acid difference with at least one of the amino acid sequences of SEQ ID NO's: 188-249;

[0972] the second stretch of amino acid residues is chosen from the group consisting of:
[0973] d) the amino acid sequences of SEQ ID NO's: 312-373 and 758;
[0974] e) amino acid sequences that have at least 80% amino acid identity with at least one of the amino acid sequences of SEQ ID NO's: 312-373 and 758;
[0975] f) amino acid sequences that have 3, 2, or 1 amino acid difference with at least one of the amino acid sequences of SEQ ID NO's: 312-373 and 758;

[0976] and the third stretch of amino acid residues is chosen from the group consisting of:
[0977] g) the amino acid sequences of SEQ ID NO's: 436-497;
[0978] h) amino acid sequences that have at least 80% amino acid identity with at least one of the amino acid sequences of SEQ ID NO's: 436-497;
[0979] i) amino acid sequences that have 3, 2, or 1 amino acid difference with at least one of the amino acid sequences of SEQ ID NO's: 436-497.
[0980] 47. Amino acid sequence according to aspect 46, in which the at least three stretches of amino acid residues forms part of the antigen binding site for binding against RANK-L.
[0981] 48. Amino acid sequence according to any of aspects 42 to 47, in which the CDR sequences of said amino acid sequence have at least 70% amino acid identity, preferably at least 80% amino acid identity, more preferably at least 90% amino acid identity, such as 95% amino acid identity or more or even essentially 100% amino acid identity with the CDR sequences of at least one of the amino acid sequences of SEQ ID NO's: 560-621.
[0982] 49. Amino acid sequence directed against RANK-L that cross-blocks the binding of at least one of the amino acid sequences according to any of aspects 42 to 48 to RANK-L.
[0983] 50. Amino acid sequence directed against RANK-L that is cross-blocked from binding to RANK-L by at least one of the amino acid sequences according to any of aspects 42 to 48.
[0984] 51. Amino acid sequence according to any of aspects 49 or 50 wherein the ability of said amino acid sequence to cross-block or to be cross-blocked is detected in a Biacore assay.
[0985] 52. Amino acid sequence according to any of aspects 49 or 50 wherein the ability of said amino acid sequence to cross-block or to be cross-blocked is detected in an ELISA assay.
[0986] 53. Amino acid sequence according to any of aspects 42 to 52, that is in essentially isolated form.
[0987] 54. Amino acid sequence according to any of aspects 42 to 53, for administration to a subject, wherein said amino acid sequence does not naturally occur in said subject.
[0988] 55. Amino acid sequence according to any of aspects 42 to 54, that can specifically bind to RANK-L with a dissociation constant (K_{D}) of 10⁻⁵ to 10⁻¹² moles/litre or less, and preferably 10⁻⁷ to 10⁻¹² moles/litre or less and more preferably 10⁻⁸ to 10⁻¹² moles/litre.
[0989] 56. Amino acid sequence according to any of aspects 42 to 55, that can specifically bind to RANK-L with a rate of association (kₒₙ-rate) of between 10² M⁻¹s⁻¹ to about 10⁷ M⁻¹s⁻¹, preferably between 10³ M⁻¹s⁻¹ and 10⁷ M⁻¹s⁻¹, more preferably between 10⁴ M⁻¹s⁻¹ and 10⁷ M⁻¹s⁻¹, such as between 10⁵ M⁻¹s⁻¹ and 10⁷ M⁻¹s⁻¹.
[0990] 57. Amino acid sequence according to any of aspects 42 to 56, that can specifically bind to RANK-L with a rate of dissociation (k_{off} rate) between 1 s⁻¹ and 10⁻⁶ s⁻¹ preferably between 10⁻² s⁻¹ and 10⁻⁶ s⁻¹, more preferably between 10⁻³ s⁻¹ and 10⁻⁶ s⁻¹, such as between 10⁻⁴ s⁻¹ and 10⁻⁶ s⁻¹.
[0991] 58. Amino acid sequence according to any of aspects 42 to 57, that can specifically bind to RANK-L with an affinity less than 500 nM, preferably less than 200 nM, more preferably less than 10 nM, such as less than 500 pM.
[0992] 59. Amino acid sequence according to any of aspects 42 to 58, that is a naturally occurring amino acid sequence (from any suitable species) or a synthetic or semi-synthetic amino acid sequence.
[0993] 60. Amino acid sequence according to any of aspects 42 to 59, that comprises an immunoglobulin fold or that under suitable conditions is capable of forming an immunoglobulin fold.
[0994] 61. Amino acid sequence according to any of aspects 42 to 60, that is an immunoglobulin sequence.
[0995] 62. Amino acid sequence according to any of aspects 42 to 61 that is a naturally occurring immunoglobulin sequence (from any suitable species) or a synthetic or semi-synthetic immunoglobulin sequence.
[0996] 63. Amino acid sequence according to any of aspects 42 to 62, that is a humanized immunoglobulin sequence, a camelized immunoglobulin sequence or an immunoglobulin sequence that has been obtained by techniques such as affinity maturation.
[0997] 64. Amino acid sequence according to any of aspects 42 to 63, that essentially consists of a light chain variable domain sequence (e.g. a V_{L}-sequence); or of a heavy chain variable domain sequence (e.g. a V_{H}-sequence).
[0998] 65. Amino acid sequence according to any of aspects 42 to 64, that essentially consists of a heavy chain variable domain sequence that is derived from a conventional four-chain antibody or that essentially consist of a heavy chain variable domain sequence that is derived from heavy chain antibody.
[0999] 66. Amino acid sequence according to any of aspects 42 to 65, that essentially consists of a domain antibody (or an amino acid sequence that is suitable for use as a domain antibody), of a single domain antibody (or an amino acid sequence that is suitable for use as a single domain antibody), of a “dAb” (or an amino acid sequence that is suitable for use as a dAb) or of a Nanobody (including but not limited to a V_{HH} sequence).
[1000] 67. Amino acid sequence according to any of aspects 42 to 66, that essentially consists of a Nanobody.
[1001] 68. Amino acid sequence according to any of aspects 42 to 67, that essentially consists of a Nanobody that
   [1002] i) has at least 80% amino acid identity with at least one of the amino acid sequences of SEQ ID NO's: 1 to 22, in which for the purposes of determining the degree of amino acid identity, the amino acid residues that form the CDR sequences are disregarded;

[1003] and in which:
[1004] ii) preferably one or more of the amino acid residues at positions 11, 37, 44, 45, 47, 83, 84, 103, 104 and 108 according to the Kabat numbering are chosen from the Hallmark residues mentioned in Table A-3.
[1005] 69. Amino acid sequence according to any of aspects 41 to 63, that essentially consists of a Nanobody that
   [1006] i) has at least 80% amino acid identity with at least one of the amino acid sequences of SEQ ID NO's: 560-621, in which for the purposes of determining the degree of amino acid identity, the amino acid residues that form the CDR sequences are disregarded;

[1007] and in which:
[1008] ii) preferably one or more of the amino acid residues at positions 11, 37, 44, 45, 47, 83, 84, 103, 104 and 108 according to the Kabat numbering are chosen from the Hallmark residues mentioned in Table A-3.
[1009] 70. Amino acid sequence according to any of aspects 42 to 69, that essentially consists of a humanized Nanobody.
[1010] 71. Amino acid sequence according to any of the preceding aspects, that in addition to the at least one binding site for binding formed by the CDR sequences, contains one or more further binding sites for binding against other antigens, proteins or targets.
[1011] 72. Amino acid sequence that essentially consists of 4 framework regions (FR1 to FR4, respectively) and 3 complementarity determining regions (CDR1 to CDR3, respectively), in which:
   [1012] CDR1 is chosen from the group consisting of:
   [1013] a) the amino acid sequences of SEQ ID NO's: 188-249;
   [1014] b) amino acid sequences that have at least 80% amino acid identity with at least one of the amino acid sequences of SEQ ID NO's: 188-249;
   [1015] c) amino acid sequences that have 3, 2, or 1 amino acid difference with at least one of the amino acid sequences of SEQ ID NO's: 188-249;

[1016] and/or
[1017] CDR2 is chosen from the group consisting of:
[1018] d) the amino acid sequences of SEQ ID NO's: 312-373 and 758;
[1019] e) amino acid sequences that have at least 80% amino acid identity with at least one of the amino acid sequences of SEQ ID NO's: 312-373 and 758;
[1020] f) amino acid sequences that have 3, 2, or 1 amino acid difference with at least one of the amino acid sequences of SEQ ID NO's: 312-373 and 758;

[1021] and/or
[1022] CDR3 is chosen from the group consisting of:
[1023] g) the amino acid sequences of SEQ ID NO's: 436-497;
[1024] h) amino acid sequences that have at least 80% amino acid identity with at least one of the amino acid sequences of SEQ ID NO's: 436-497;
[1025] i) amino acid sequences that have 3, 2, or 1 amino acid difference with at least one of the amino acid sequences of SEQ ID NO's: 436-497.
[1026] 73. Amino acid sequence that essentially consists of 4 framework regions (FR1 to FR4, respectively) and 3 complementarity determining regions (CDR1 to CDR3, respectively), in which:
   [1027] CDR1 is chosen from the group consisting of:
   [1028] a) the amino acid sequences of SEQ ID NO's: 188-249;
   [1029] b) amino acid sequences that have at least 80% amino acid identity with at least one of the amino acid sequences of SEQ ID NO's: 188-249;
   [1030] c) amino acid sequences that have 3, 2, or 1 amino acid difference with at least one of the amino acid sequences of SEQ ID NO's: 188-249;

[1031] and
[1032] CDR2 is chosen from the group consisting of:
[1033] d) the amino acid sequences of SEQ ID NO's: 312-373 and 758;
[1034] e) amino acid sequences that have at least 80% amino acid identity with at least one of the amino acid sequences of SEQ ID NO's: 312-373 and 758;
[1035] f) amino acid sequences that have 3, 2, or 1 amino acid difference with at least one of the amino acid sequences of SEQ ID NO's: 312-373 and 758;

[1036] and
[1037] CDR3 is chosen from the group consisting of:
[1038] g) the amino acid sequences of SEQ ID NO's: 436-497;
[1039] h) amino acid sequences that have at least 80% amino acid identity with at least one of the amino acid sequences of SEQ ID NO's: 436-497;
[1040] i) amino acid sequences that have 3, 2, or 1 amino acid difference with at least one of the amino acid sequences of SEQ ID NO's: 436-497.
[1041] 74. Amino acid sequence according to any of aspects 72 to 73, in which the CDR sequences of said amino acid sequence have at least 70% amino acid identity, preferably at least 80% amino acid identity, more preferably at least 90% amino acid identity, such as 95% amino acid identity or more or even essentially 100% amino acid identity with the CDR sequences of at least one of the amino acid sequences of SEQ ID NO's: 560-621.
[1042] 75. Amino acid sequence directed against RANK-L that cross-blocks the binding of at least one of the amino acid sequences according to any of aspects 72 to 74 to RANK-L.
[1043] 76. Amino acid sequence directed against RANK-L that is cross-blocked from binding to RANK-L by at least one of the amino acid sequences according to any of aspects 72 to 74.
[1044] 77. Amino acid sequence according to any of aspects 75 or 76 wherein the ability of said amino acid sequence to cross-block or to be cross-blocked is detected in a Biacore assay.
[1045] 78. Amino acid sequence according to any of aspects 75 or 76 wherein the ability of said amino acid sequence to cross-block or to be cross-blocked is detected in an ELISA assay.
[1046] 79. Amino acid sequence according to any of aspects 72 to 78, that is in essentially isolated form.
[1047] 80. Amino acid sequence according to any of aspects 72 to 79, for administration to a subject, wherein said amino acid sequence does not naturally occur in said subject.
[1048] 81. Amino acid sequence according to any of aspects 72 to 80, that can specifically bind to RANK-L with a dissociation constant (K_{D}) of 10⁻⁵ to 10⁻¹² moles/litre or less, and preferably 10⁻⁷ to 10⁻¹² moles/litre or less and more preferably 10⁻⁸ to 10⁻¹² moles/litre.
[1049] 82. Amino acid sequence according to any of aspects 72 to 81, that can specifically bind to RANK-L with a rate of association (kₒₙ-rate) of between 10² M⁻¹s⁻¹ to about 10⁷ M⁻¹s⁻¹, preferably between 10³ M⁻¹s⁻¹ and 10⁷ M⁻¹s⁻¹, more preferably between 10⁴ M⁻¹s⁻¹ and 10⁷ M⁻¹s⁻¹, such as between 10⁵ M⁻¹s⁻¹ and 10⁷ M⁻¹s⁻¹.
[1050] 83. Amino acid sequence according to any of aspects 72 to 82, that can specifically bind to RANK-L with a rate of dissociation (k_{off} rate) between 1 s⁻¹ and 10⁻⁶ s⁻¹ preferably between 10⁻² s⁻¹ and 10⁻⁶ s⁻¹, more preferably between 10⁻³ s⁻¹ and 10⁻⁶ s⁻¹, such as between 10⁻⁴ s⁻¹ and 10⁻⁶ s⁻¹.
[1051] 84. Amino acid sequence according to any of aspects 72 to 83, that can specifically bind to RANK-L with an affinity less than 500 nM, preferably less than 200 nM, more preferably less than 10 nM, such as less than 500 pM.
[1052] 85. Amino acid sequence according to any of aspects 72 to 84, that is a naturally occurring amino acid sequence (from any suitable species) or a synthetic or semi-synthetic amino acid sequence.
[1053] 86. Amino acid sequence according to any of aspects 72 to 85, that comprises an immunoglobulin fold or that under suitable conditions is capable of forming an immunoglobulin fold.
[1054] 87. Amino acid sequence according to any of aspects 72 to 86, that is an immunoglobulin sequence.
[1055] 88. Amino acid sequence according to any of aspects 72 to 87, that is a naturally occurring immunoglobulin sequence (from any suitable species) or a synthetic or semi-synthetic immunoglobulin sequence.
[1056] 89. Amino acid sequence according to any of aspects 72 to 88, that is a humanized immunoglobulin sequence, a camelized immunoglobulin sequence or an immunoglobulin sequence that has been obtained by techniques such as affinity maturation.
[1057] 90. Amino acid sequence according to any of aspects 73 to 89, that essentially consists of a light chain variable domain sequence (e.g. a V_{L}-sequence); or of a heavy chain variable domain sequence (e.g. a V_{H}-sequence).
[1058] 91. Amino acid sequence according to any of aspects 72 to 90, that essentially consists of a heavy chain variable domain sequence that is derived from a conventional four-chain antibody or that essentially consist of a heavy chain variable domain sequence that is derived from heavy chain antibody.
[1059] 92. Amino acid sequence according to any of aspects 72 to 91, that essentially consists of a domain antibody (or an amino acid sequence that is suitable for use as a domain antibody), of a single domain antibody (or an amino acid sequence that is suitable for use as a single domain antibody), of a “dAb” (or an amino acid sequence that is suitable for use as a dAb) or of a Nanobody (including but not limited to a V_{HH} sequence).
[1060] 93. Amino acid sequence according to any of aspects 72 to 92, that essentially consists of a Nanobody.
[1061] 94. Amino acid sequence according to any of aspects 72 to 93, that essentially consists of a Nanobody that
   [1062] i) has at least 80% amino acid identity with at least one of the amino acid sequences of SEQ ID NO's: 1 to 22, in which for the purposes of determining the degree of amino acid identity, the amino acid residues that form the CDR sequences are disregarded;

[1063] and in which:
[1064] ii) preferably one or more of the amino acid residues at positions 11, 37, 44, 45, 47, 83, 84, 103, 104 and 108 according to the Kabat numbering are chosen from the Hallmark residues mentioned in Table A-3.
[1065] 95. Amino acid sequence according to any of aspects 72 to 94, that essentially consists of a Nanobody that
   [1066] i) has at least 80% amino acid identity with at least one of the amino acid sequences of SEQ ID NO's: 560-621, in which for the purposes of determining the degree of amino acid identity, the amino acid residues that form the CDR sequences are disregarded;

[1067] and in which:
[1068] ii) preferably one or more of the amino acid residues at positions 11, 37, 44, 45, 47, 83, 84, 103, 104 and 108 according to the Kabat numbering are chosen from the Hallmark residues mentioned in Table A-3.
[1069] 96. Amino acid sequence according to any of aspects 72 to 95, that essentially consists of a humanized Nanobody.
[1070] 97. Amino acid sequence according to any of the preceding aspects, that in addition to the at least one binding site for binding formed by the CDR sequences, contains one or more further binding sites for binding against other antigens, proteins or targets.
[1071] 98. Nanobody that is directed against and/or that can specifically bind to RANK-L.
[1072] 99. Nanobody according to aspect 98, which is directed against and/or can specifically bind to the RANK receptor binding site on RANK-L.
[1073] 100. Nanobody according to any of aspects 98 or 99, which is directed against and/or can specifically bind to the intersubunit receptor-binding grooves on the RANK-L trimer.
[1074] 101. Nanobody according to any of aspects 98 to 100, which modulates binding of RANKL-L to RANK.
[1075] 102. Nanobody according to aspect 101, which inhibits and/or prevents binding of RANKL-L to RANK.
[1076] 103. Nanobody according to aspect 102, which inhibits and/or prevents binding of RANKL-L to RANK, while not reducing and/or inhibiting the RANK-L/OPG interaction.
[1077] 104. Nanobody according to any of aspects 98 to 103, which is an antagonist of RANK-L.
[1078] 105. Nanobody according aspect 98, which is directed against and/or can specifically bind to the OPG binding site on RANK-L.
[1079] 106. Nanobody according aspects 98 or 105, which modulates binding of RANKL-L to OPG.
[1080] 107. Nanobody according to aspect 106, which inhibits the RANK/RANK-L interaction.
[1081] 108. Nanobody according to aspect 107, which is an antagonist of RANK-L.
[1082] 109. Nanobody according to aspect 106, which does not reduce or inhibit the RANK/RANK-L interaction.
[1083] 110. Nanobody according to aspect 109, which is an agonist of RANK-L.
[1084] 111. Nanobody according to aspect 98, which prevents and/or inhibits the formation of the RANK-L trimer.
[1085] 112. Nanobody according to aspect 98, which prevents and/or inhibits the differentiation and/or proliferation of osteoclasts.
[1086] 113. Nanobody according to aspect 98, which modulates bone remodelling.
[1087] 114. Nanobody according to any of aspects 98 to 113, which does not bind TRAIL.
[1088] 115. Nanobody according to any of aspects 98 to 114, which does not bind TNF-alpha.
[1089] 116. Nanobody according to any of aspects 98 to 115, which does not bind CD40 ligand.
[1090] 117. Nanobody according to any of aspects 98 to 116, which does not bind related TNF family members.
[1091] 118. Nanobody according to any of aspects 98 to 117, that is in essentially isolated form.
[1092] 119. Nanobody according to any of aspects 98 to 118, that can specifically bind to RANK-L with a dissociation constant (K_{D}) of 10⁻⁵ to 10⁻¹² moles/litre or less, and preferably 10⁻⁷ to 10⁻¹² moles/litre or less and more preferably 10⁻⁸ to 10⁻¹² moles/litre.
[1093] 120. Nanobody according to any of aspects 98 to 119, that can specifically bind to RANK-L with a rate of association (kₒₙ-rate) of between 10² M⁻¹s⁻¹ to about 10⁷ M⁻¹s⁻¹, preferably between 10³ M⁻¹s⁻¹ and 10⁷ M⁻¹s⁻¹, more preferably between 10⁴ M⁻¹s⁻¹ and 10⁷ M⁻¹s⁻¹, such as between 10⁵ M⁻¹s⁻¹ and 10⁷ M⁻¹s⁻¹.
[1094] 121. Nanobody according to any of aspects 98 to 120, that can specifically bind to RANK-L with a rate of dissociation (k_{off} rate) between 1 s⁻¹ and 10⁻⁶ s⁻¹ preferably between 10⁻² s⁻¹ and 10⁻⁶ s⁻¹, more preferably between 10⁻³ s⁻¹ and 10⁻⁶ s⁻¹, such as between 10⁻⁴s⁻¹ and 10⁻⁶ s⁻¹.
[1095] 122. Nanobody according to any of aspects 98 to 121, that can specifically bind to RANK-L with an affinity less than 500 nM, preferably less than 200 nM, more preferably less than 10 nM, such as less than 500 pM.
[1096] 123. Nanobody according to any of aspects 98 to 122, that is a naturally occurring Nanobody (from any suitable species) or a synthetic or semi-synthetic Nanobody.
[1097] 124. Nanobody according to any of aspects 98 to 123 that is a V_{HH} sequence, a partially humanized V_{HH} sequence, a fully humanized V_{HH} sequence, a camelized heavy chain variable domain or a Nanobody that has been obtained by techniques such as affinity maturation.
[1098] 125. Nanobody according to any of aspects 98 to 124, that
   [1099] i) has at least 80% amino acid identity with at least one of the amino acid sequences of SEQ ID NO's: 1 to 22, in which for the purposes of determining the degree of amino acid identity, the amino acid residues that form the CDR sequences are disregarded;

[1100] and in which:
[1101] ii) preferably one or more of the amino acid residues at positions 11, 37, 44, 45, 47, 83, 84, 103, 104 and 108 according to the Kabat numbering are chosen from the Hallmark residues mentioned in Table A-3.
[1102] 126. Nanobody according to any of aspects 98 to 125, that
   [1103] i) has at least 80% amino acid identity with at least one of the amino acid sequences of SEQ ID NO's: 560-621, in which for the purposes of determining the degree of amino acid identity, the amino acid residues that form the CDR sequences are disregarded;

[1104] and in which:
[1105] ii) preferably one or more of the amino acid residues at positions 11, 37, 44, 45, 47, 83, 84, 103, 104 and 108 according to the Kabat numbering are chosen from the Hallmark residues mentioned in Table A-3.
[1106] 127. Nanobody according to any of aspects 98 to 126, in which:
   [1107] CDR1 is chosen from the group consisting of:
   [1108] a) the amino acid sequences of SEQ ID NO's: 188-249;
   [1109] b) amino acid sequences that have at least 80% amino acid identity with at least one of the amino acid sequences of SEQ ID NO's: 188-249;
   [1110] c) amino acid sequences that have 3, 2, or 1 amino acid difference with at least one of the amino acid sequences of SEQ ID NO's: 188-249;

[1111] and/or
[1112] CDR2 is chosen from the group consisting of:
[1113] d) the amino acid sequences of SEQ ID NO's: 312-373 and 758;
[1114] e) amino acid sequences that have at least 80% amino acid identity with at least one of the amino acid sequences of SEQ ID NO's: 312-373 and 758;
[1115] f) amino acid sequences that have 3, 2, or 1 amino acid difference with at least one of the amino acid sequences of SEQ ID NO's: 312-373 and 758;

[1116] and/or
[1117] CDR3 is chosen from the group consisting of:
[1118] g) the amino acid sequences of SEQ ID NO's: 436-497;
[1119] h) amino acid sequences that have at least 80% amino acid identity with at least one of the amino acid sequences of SEQ ID NO's: 436-497;
[1120] i) amino acid sequences that have 3, 2, or 1 amino acid difference with at least one of the amino acid sequences of SEQ ID NO's: 436-497.
[1121] 128. Nanobody according to any of aspects 98 to 129, in which:
   [1122] CDR1 is chosen from the group consisting of:
   [1123] a) the amino acid sequences of SEQ ID NO's: 188-249;
   [1124] b) amino acid sequences that have at least 80% amino acid identity with at least one of the amino acid sequences of SEQ ID NO's: 188-249;
   [1125] c) amino acid sequences that have 3, 2, or 1 amino acid difference with at least one of the amino acid sequences of SEQ ID NO's: 188-249;

[1126] and
[1127] CDR2 is chosen from the group consisting of:
[1128] d) the amino acid sequences of SEQ ID NO's: 312-373 and 758;
[1129] e) amino acid sequences that have at least 80% amino acid identity with at least one of the amino acid sequences of SEQ ID NO's: 312-373 and 758;
[1130] f) amino acid sequences that have 3, 2, or 1 amino acid difference with at least one of the amino acid sequences of SEQ ID NO's: 312-373 and 758;

[1131] and
[1132] CDR3 is chosen from the group consisting of:
[1133] g) the amino acid sequences of SEQ ID NO's: 436-497;
[1134] h) amino acid sequences that have at least 80% amino acid identity with at least one of the amino acid sequences of SEQ ID NO's: 436-497;
[1135] i) amino acid sequences that have 3, 2, or 1 amino acid difference with at least one of the amino acid sequences of SEQ ID NO's: 439-497.
[1136] 129. Nanobody according to any of aspects 98 to 128, in which the CDR sequences have at least 70% amino acid identity, preferably at least 80% amino acid identity, more preferably at least 90% amino acid identity, such as 95% amino acid identity or more or even essentially 100% amino acid identity with the CDR sequences of at least one of the amino acid sequences of SEQ ID NO's: 560-621.
[1137] 130. Nanobody according to any of aspects 98 to 129, which is a partially humanized Nanobody.
[1138] 131. Nanobody according to any of aspects 98 to 130, which is a fully humanized Nanobody.
[1139] 132. Nanobody according to any of aspects 98 to 131, that is chosen from the group consisting of SEQ ID NO's: 560-621 or from the group consisting of from amino acid sequences that have more than 80%, preferably more than 90%, more preferably more than 95%, such as 99% or more sequence identity (as defined herein) with at least one of the amino acid sequences of SEQ ID NO's: 560-621.
[1140] 133. Nanobody according to any of aspects 98 to 131, which is a humanized Nanobody that is chosen from the group consisting of SEQ ID NO's: 730-757 and 765 or from the group consisting of from amino acid sequences that have more than 80%, preferably more than 90%, more preferably more than 95%, such as 99% or more sequence identity (as defined herein) with at least one of the amino acid sequences of SEQ ID NO's: 730-757 and 765.
[1141] 134. Nanobody according to any of aspects 98 to 133, that is chosen from the group consisting of SEQ ID NO's: 560-621 or from the group consisting of SEQ ID NO's: 730-757 and 765.
[1142] 135. Nanobody directed against RANK-L that cross-blocks the binding of at least one of the amino acid sequences according to any of aspects 42 to 48 or 72 to 74 or Nanobodies according to any of aspects 127 to 134 to RANK-L.
[1143] 136. Nanobody directed against RANK-L that is cross-blocked from binding to RANK-L by at least one of the amino acid sequences according to any of aspects 42 to 48 or 72 to 74 or Nanobodies according to any of aspects 127 to 143.
[1144] 137. Nanobody according to any of aspects 135 or 136 wherein the ability of said Nanobody to cross-block or to be cross-blocked is detected in a Biacore assay.
[1145] 138. Nanobody according to any of aspects 135 or 136 wherein the ability of said Nanobody to cross-block or to be cross-blocked is detected in an ELISA assay.
[1146] 139. Polypeptide that comprises or essentially consists of one or more amino acid sequences according to any of aspects 1 to 97 and/or one or more Nanobodies according to any of aspects 98 to 138, and optionally further comprises one or more other amino acid binding units, optionally linked via one or more peptidic linkers.
[1147] 140. Polypeptide according to aspect 139, in which said one or more binding units are immunoglobulin sequences.
[1148] 141. Polypeptide according to any of aspects 139 or 140, in which said one or more other binding units are chosen from the group consisting of domain antibodies, amino acid sequences that are suitable for use as a domain antibody, single domain antibodies, amino acid sequences that are suitable for use as a single domain antibody, “dAb”'s, amino acid sequences that are suitable for use as a dAb, or Nanobodies.
[1149] 142. Polypeptide according to any of aspects 139 to 141, in which said one or more amino acid sequences of the invention are immunoglobulin sequences.
[1150] 143. Polypeptide according to any of aspects 139 to 142, in which said one or more amino acid sequences of the invention are chosen from the group consisting of domain antibodies, amino acid sequences that are suitable for use as a domain antibody, single domain antibodies, amino acid sequences that are suitable for use as a single domain antibody, “dAb”'s, amino acid sequences that are suitable for use as a dAb, or Nanobodies.
[1151] 144. Polypeptide according to any of aspects 139 to 143, that comprises or essentially consists of one or more Nanobodies according to any of aspects 98 to 138 and in which said one or more other binding units are Nanobodies.
[1152] 145. Polypeptide according to any of aspects 139 to 144, which is a multivalent construct.
[1153] 146. Polypeptide according to any of aspects 139 to 145, which is a multiparatopic construct.
[1154] 147. Polypeptide according to any of aspects 139 to 146, which is a multispecific construct.
[1155] 148. Polypeptide according to any of aspects 139 to 147, which has an increased half-life, compared to the corresponding amino acid sequence according to any of aspects 1 to 97 per se or Nanobody according to any of aspects 98 to 138 per se, respectively.
[1156] 149. Polypeptide according to aspect 148, in which said one or more other binding units provide the polypeptide with increased half-life, compared to the corresponding amino acid sequence according to any of aspects 1 to 97 per se or Nanobody according to any of aspects 98 to 138 per se, respectively.
[1157] 150. Polypeptide according to aspect 149, in which said one or more other binding units that provide the polypeptide with increased half-life is chosen from the group consisting of serum proteins or fragments thereof, binding units that can bind to serum proteins, an Fc portion, and small proteins or peptides that can bind to serum proteins.
[1158] 151. Polypeptide according to aspect 149, in which said one or more other binding units that provide the polypeptide with increased half-life is chosen from the group consisting of human serum albumin or fragments thereof.
[1159] 152. Polypeptide according to aspect 149, in which said one or more other binding units that provides the polypeptide with increased half-life are chosen from the group consisting of binding units that can bind to serum albumin (such as human serum albumin) or a serum immunoglobulin (such as IgG).
[1160] 153. Polypeptide according to aspect 149, in which said one or more other binding units that provides the polypeptide with increased half-life are chosen from the group consisting of domain antibodies, amino acid sequences that are suitable for use as a domain antibody, single domain antibodies, amino acid sequences that are suitable for use as a single domain antibody, “dAb”'s, amino acid sequences that are suitable for use as a dAb, or Nanobodies that can bind to serum albumin (such as human serum albumin) or a serum immunoglobulin (such as IgG).
[1161] 154. Polypeptide according to aspect 149, in which said one or more other binding units that provides the polypeptide with increased half-life is a Nanobody that can bind to serum albumin (such as human serum albumin) or a serum immunoglobulin (such as IgG).
[1162] 155. Polypeptide according to any of aspects 148 to 154, that has a serum half-life that is at least 1.5 times, preferably at least 2 times, such as at least 5 times, for example at least 10 times or more than 20 times, greater than the half-life of the corresponding amino acid sequence according to any of aspects 1 to 97 per se or Nanobody according to any of aspects 98 to 138 per se, respectively.
[1163] 156. Polypeptide according to any of aspects 148 to 155, that has a serum half-life that is increased with more than 1 hours, preferably more than 2 hours, more preferably more than 6 hours, such as more than 12 hours, or even more than 24, 48 or 72 hours, compared to the corresponding amino acid sequence according to any of aspects 1 to 97 per se or Nanobody according to any of aspects 98 to 138 per se, respectively.
[1164] 157. Polypeptide according to any of aspects 148 to 156, that has a serum half-life in human of at least about 12 hours, preferably at least 24 hours, more preferably at least 48 hours, even more preferably at least 72 hours or more; for example, of at least 5 days (such as about 5 to 10 days), preferably at least 9 days (such as about 9 to 14 days), more preferably at least about 10 days (such as about 10 to 15 days), or at least about 11 days (such as about 11 to 16 days), more preferably at least about 12 days (such as about 12 to 18 days or more), or more than 14 days (such as about 14 to 19 days).
[1165] 158. Compound or construct, that comprises or essentially consists of one or more amino acid sequences according to any of aspects 1 to 97 and/or one or more Nanobodies according to any of aspects 98 to 138, and optionally further comprises one or more other groups, residues, moieties or binding units, optionally linked via one or more linkers.
[1166] 159. Compound or construct according to aspect 158, in which said one or more other groups, residues, moieties or binding units are amino acid sequences.
[1167] 160. Compound or construct according to any of aspects 158 to 159, in which said one or more linkers, if present, are one or more amino acid sequences.
[1168] 161. Compound or construct according to any of aspects 158 to 160, in which said one or more other groups, residues, moieties or binding units are immunoglobulin sequences.
[1169] 162. Compound or construct according to any of aspects 158 to 161, in which said one or more other groups, residues, moieties or binding units are chosen from the group consisting of domain antibodies, amino acid sequences that are suitable for use as a domain antibody, single domain antibodies, amino acid sequences that are suitable for use as a single domain antibody, “dAb”'s, amino acid sequences that are suitable for use as a dAb, or Nanobodies.
[1170] 163. Compound or construct according to any of aspect 158 to 162, in which said one or more amino acid sequences of the invention are immunoglobulin sequences.
[1171] 164. Compound or construct according to any of aspects 158 to 163, in which said one or more amino acid sequences of the invention are chosen from the group consisting of domain antibodies, amino acid sequences that are suitable for use as a domain antibody, single domain antibodies, amino acid sequences that are suitable for use as a single domain antibody, “dAb”'s, amino acid sequences that are suitable for use as a dAb, or Nanobodies.
[1172] 165. Compound or construct, that comprises or essentially consists of one or more Nanobodies according to any of aspects 98 to 138 and in which said one or more other groups, residues, moieties or binding units are Nanobodies.
[1173] 166. Compound or construct according to any of aspects 158 to 165, which is a multivalent construct.
[1174] 167. Compound or construct according to any of aspects 158 to 166, which is a multiparatopic construct.
[1175] 168. Compound or construct according to any of aspects 158 to 167, which is a multispecific construct.
[1176] 169. Compound or construct according to any of aspects 158 to 168, which has an increased half-life, compared to the corresponding amino acid sequence according to any of aspects 1 to 97 per se or Nanobody according to any of aspects 98 to 138 per se, respectively.
[1177] 170. Compound or construct according to aspect 169, in which said one or more other groups, residues, moieties or binding units provide the compound or construct with increased half-life, compared to the corresponding amino acid sequence according to any of aspects 1 to 97 per se or Nanobody according to any of aspects 98 to 138 per se, respectively
[1178] 171. Compound or construct according to aspect 170, in which said one or more other groups, residues, moieties or binding units that provide the compound or construct with increased half-life is chosen from the group consisting of serum proteins or fragments thereof, binding units that can bind to serum proteins, an Fc portion, and small proteins or peptides that can bind to serum proteins.
[1179] 172. Compound or construct according to aspect 170, in which said one or more other groups, residues, moieties or binding units that provide the compound or construct with increased half-life is chosen from the group consisting of human serum albumin or fragments thereof.
[1180] 173. Compound or construct according to aspect 170, in which said one or more other groups, residues, moieties or binding units that provides the compound or construct with increased half-life are chosen from the group consisting of binding units that can bind to serum albumin (such as human serum albumin) or a serum immunoglobulin (such as IgG).
[1181] 174. Compound or construct according to aspect 170, in which said one or more other groups, residues, moieties or binding units that provides the compound or construct with increased half-life are chosen from the group consisting of domain antibodies, amino acid sequences that are suitable for use as a domain antibody, single domain antibodies, amino acid sequences that are suitable for use as a single domain antibody, “dAb”'s, amino acid sequences that are suitable for use as a dAb, or Nanobodies that can bind to serum albumin (such as human serum albumin) or a serum immunoglobulin (such as IgG).
[1182] 175. Compound or construct according to aspect 170, in which said one or more other groups, residues, moieties or binding units that provides the compound or construct with increased half-life is a Nanobody that can bind to serum albumin (such as human serum albumin) or a serum immunoglobulin (such as IgG).
[1183] 176. Compound or construct according to any of aspects 169 to 175, that has a serum half-life that is at least 1.5 times, preferably at least 2 times, such as at least 5 times, for example at least 10 times or more than 20 times, greater than the half-life of the corresponding amino acid sequence according to any of aspects 1 to 97 per se or Nanobody according to any of aspects 98 to 138 per se, respectively.
[1184] 177. Compound or construct according to any of aspects 169 to 176, that has a serum half-life that is increased with more than 1 hours, preferably more than 2 hours, more preferably more than 6 hours, such as more than 12 hours, or even more than 24, 48 or 72 hours, compared to the corresponding amino acid sequence according to any of aspects 1 to 978 per se or Nanobody according to any of aspects 98 to 138 per se, respectively.
[1185] 178. Compound or construct according to any of aspects 169 to 177, that has a serum half-life in human of at least about 12 hours, preferably at least 24 hours, more preferably at least 48 hours, even more preferably at least 72 hours or more; for example, of at least 5 days (such as about 5 to 10 days), preferably at least 9 days (such as about 9 to 14 days), more preferably at least about 10 days (such as about 10 to 15 days), or at least about 11 days (such as about 11 to 16 days), more preferably at least about 12 days (such as about 12 to 18 days or more), or more than 14 days (such as about 14 to 19 days).
[1186] 179. Monovalent construct, comprising or essentially consisting of one amino acid sequence according to any of aspects 1 to 97 and/or one Nanobody according to any of aspects 98 to 138.
[1187] 180. Monovalent construct according to aspect 179, in which said amino acid sequence of the invention is chosen from the group consisting of domain antibodies, amino acid sequences that are suitable for use as a domain antibody, single domain antibodies, amino acid sequences that are suitable for use as a single domain antibody, “dAb”'s, amino acid sequences that are suitable for use as a dAb, or Nanobodies.
[1188] 181. Monovalent construct, comprising or essentially consisting of one Nanobody according to any of aspects 98 to 138.
[1189] 182. Nucleic acid or nucleotide sequence, that encodes an amino acid sequence according to any of aspects 1 to 97, a Nanobody according to any of aspects 98 to 138, a polypeptide according to any of aspects 139 to 157, a compound or construct according to any of aspects 158 to 178, or a monovalent construct according to any of aspects 179 to 181.
[1190] 183. Nucleic acid or nucleotide sequence according to aspect 182, that is in the form of a genetic construct.
[1191] 184. Host or host cell that expresses, or that under suitable circumstances is capable of expressing, an amino acid sequence according to any of aspects 1 to 97, a Nanobody according to any of aspects 98 to 138, a polypeptide according to any of aspects 139 to 157, a compound or construct according to any of aspects 158 to 178, or a monovalent construct according to any of aspects 179 to 181; and/or that comprises a nucleic acid or nucleotide sequence according to aspect 182, or a genetic construct according to aspect 183.
[1192] 185. Composition, comprising at least one amino acid sequence according to any of aspects 1 to 97, Nanobody according to any of aspects 98 to 138, polypeptide according to any of aspects 139 to 157, compound or construct according to any of aspects 158 to 178, monovalent construct according to any of aspects 179 to 181, or nucleic acid or nucleotide sequence according to aspects 182 to 183.
[1193] 186. Composition according to aspect 185, which is a pharmaceutical composition.
[1194] 187. Composition according to aspect 186, which is a pharmaceutical composition, that further comprises at least one pharmaceutically acceptable carrier, diluent or excipient and/or adjuvant, and that optionally comprises one or more further pharmaceutically active polypeptides and/or compounds.
[1195] 188. Method for producing an amino acid sequence according to any of aspects 1 to 97, a Nanobody according to any of aspects 98 to 138, a polypeptide according to any of aspects 139 to 157, a compound or construct according to any of aspects 158 to 178, a pharmaceutical composition according to any of aspects 186 or 187, or a monovalent construct according to any of aspects 179 to 181, that is such that it can be obtained by expression of a nucleic acid or nucleotide sequence encoding the same, said method at least comprising the steps of:
   [1196] expressing, in a suitable host cell or host organism or in another suitable expression system, a nucleic acid or nucleotide sequence according to aspect 182, or a genetic construct according to aspect 183,
   [1197] optionally followed by:
   [1198] isolating and/or purifying the amino acid sequence according to any of aspects 1 to 97, the Nanobody according to any of aspects 98 to 138, the polypeptide according to any of aspects 139 to 157, the compound or construct according to any of aspects 158 to 178, that is such that it can be obtained by expression of a nucleic acid or nucleotide sequence encoding the same, or the monovalent construct according to any of aspects 179 to 181, thus obtained.
[1199] 189. Method for producing an amino acid sequence according to any of aspects 1 to 97, a Nanobody according to any of aspects 98 to 138, a polypeptide according to any of aspects 139 to 157, a compound or construct according to any of aspects 158 to 178, a pharmaceutical composition according to any of aspects 186 or 187, or a monovalent construct according to any of aspects 179 to 181, that is such that it can be obtained by expression of a nucleic acid or nucleotide sequence encoding the same, said method at least comprising the steps of:
   [1200] cultivating and/or maintaining a host or host cell according to aspect 184 under conditions that are such that said host or host cell expresses and/or produces at least one amino acid sequence according to any of aspects 1 to 97, Nanobody according to any of aspects 98 to 138, polypeptide according to any of aspects 139 to 157, compound or construct according to any of aspects 158 to 178, that is such that it can be obtained by expression of a nucleic acid or nucleotide sequence encoding the same, or a monovalent construct according to any of aspects 179 to 181,
   [1201] optionally followed by:
   [1202] isolating and/or purifying the amino acid sequence according to any of aspects 1 to 97, the Nanobody according to any of aspects 98 to 138, the polypeptide according to any of aspects 139 to 157, the compound or construct according to any of aspects 158 to 178, that is such that it can be obtained by expression of a nucleic acid or nucleotide sequence encoding the same, or the monovalent construct according to any of aspects 179 to 181 thus obtained.
[1203] 190. Method for screening amino acid sequences directed against RANK-L that comprises at least the steps of:
   [1204] a) providing a set, collection or library of nucleic acid sequences encoding amino acid sequences;
   [1205] b) screening said set, collection or library of nucleic acid sequences for nucleic acid sequences that encode an amino acid sequence that can bind to and/or has affinity for RANK-L and that is cross-blocked or is cross blocking a Nanobody of the invention, e.g. SEQ ID NO's: 560-621, or a humanized Nanobody of the invention, e.g. SEQ ID NO's: 730-757 and 765, or a polypeptide or construct of the invention, e.g. SEQ ID NO's: 622-729, 759-762 and 766-773; and
   [1206] c) isolating said nucleic acid sequence, followed by expressing said amino acid sequence.
[1207] 191. Method for the prevention and/or treatment of at least one bone disease or disorder, said method comprising administering, to a subject in need thereof, a pharmaceutically active amount of at least one amino acid sequence according to any of aspects 1 to 97, Nanobody according to any of aspects 98 to 138, polypeptide according to any of aspects 139 to 157, compound or construct according to any of aspects 158 to 178, monovalent construct according to any of aspects 179 to 181, or composition according to aspect 186 or 187.
[1208] 192. Method for the prevention and/or treatment of at least one disease or disorder that is associated with RANK-L, with its biological or pharmacological activity, and/or with the biological pathways or signalling in which RANK-L is involved, said method comprising administering, to a subject in need thereof, a pharmaceutically active amount of at least one amino acid sequence according to any of aspects 1 to 97, Nanobody according to any of aspects 98 to 138, polypeptide according to any of aspects 139 to 157, compound or construct according to any of aspects 158 to 178, monovalent construct according to any of aspects 179 to 181, or composition according to aspect 186 or 187.
[1209] 193. Method for the prevention and/or treatment of at least one disease or disorder that can be prevented and/or treated by administering, to a subject in need thereof, an amino acid sequence according to any of aspects 1 to 97, Nanobody according to any of aspects 98 to 138, polypeptide according to any of aspects 139 to 157, compound or construct according to any of aspects 158 to 178 or a monovalent construct according to any of aspects 179 to 181, said method comprising administering, to a subject in need thereof, a pharmaceutically active amount of at least one amino acid sequence according to any of aspects 1 to 97, Nanobody according to any of aspects 98 to 138, polypeptide according to any of aspects 139 to 157, compound or construct according to any of aspects 158 to 178, monovalent construct according to any of aspects 179 to 181, or composition according to aspect 186 or 187.
[1210] 194. Method for immunotherapy, said method comprising administering, to a subject in need thereof, a pharmaceutically active amount of at least one amino acid sequence according to any of aspects 1 to 97, Nanobody according to any of aspects 98 to 138, polypeptide according to any of aspects 139 to 157, compound or construct according to any of aspects 158 to 178, monovalent construct according to any of aspects 179 to 181, or composition according to aspect 186 or 187.
[1211] 195. Use of an amino acid sequence according to any of aspects 1 to 97, Nanobody according to any of aspects 98 to 138, polypeptide according to any of aspects 139 to 157, compound or construct according to any of aspects 158 to 178 or a monovalent construct according to any of aspects 179 to 181, in the preparation of a pharmaceutical composition for prevention and/or treatment of at least one bone disease or disorder; and/or for use in one or more of the methods according to aspects 191 to 194.
[1212] 196. Amino acid sequence according to any of aspects 1 to 97, Nanobody according to any of aspects 98 to 138, polypeptide according to any of aspects 139 to 157, compound or construct according to any of aspects 158 to 178, or a monovalent construct according to any of aspects 179 to 181 for prevention and/or treatment of at least one bone disease or disorder.
[1213] 197. Part or fragment of an amino acid sequence according to any of aspects 1 to 97, or of a Nanobody according to any of aspects 98 to 138.
[1214] 198. Part or fragment according to aspect 197, which is directed against and/or can specifically bind to the RANK receptor binding site on RANK-L.
[1215] 199. Part or fragment according to any of aspects 197 or 198, which is directed against and/or can specifically bind to the intersubunit receptor-binding grooves on the RANK-L trimer.
[1216] 200. Part or fragment according to any of aspects 197 to 199, which modulates binding of RANKL-L to RANK.
[1217] 201. Part or fragment according to aspect 200, which inhibits and/or prevents binding of RANKL-L to RANK.
[1218] 202. Part or fragment according to aspect 201, which inhibits and/or prevents binding of RANKL-L to RANK, while not reducing and/or inhibiting the RANK-L/OPG interaction.
[1219] 203. Part or fragment according to any of aspects 197 to 202, which is an antagonist of RANK-L
[1220] 204. Part or fragment according aspect 197, which is directed against and/or can specifically bind to the OPG binding site on RANK-L.
[1221] 205. Part or fragment according aspects 197 or 204, which modulates binding of RANKL-L to OPG.
[1222] 206. Part or fragment according to aspect 205, which inhibits the RANK/RANK-L interaction.
[1223] 207. Part or fragment according to aspect 206, which is an antagonist of RANK-L.
[1224] 208. Part or fragment according to aspect 205, which does not reduce or inhibit the RANK/RANK-L interaction.
[1225] 209. Part or fragment according to aspect 208, which is an agonist of RANK-L.
[1226] 210. Part or fragment according to aspect 197, which prevents and/or inhibits the formation of the RANK-L trimer.
[1227] 211. Part or fragment according to aspect 197, which prevents and/or inhibits the differentiation and/or proliferation of osteoclasts.
[1228] 212. Part or fragment according to aspect 197, which modulates bone remodelling.
[1229] 213. Part or fragment according to any of aspects 197 to 212, which does not bind TRAIL.
[1230] 214. Part or fragment according to any of aspects 197 to 213, which does not bind TNF-alpha.
[1231] 215. Part or fragment according to any of aspects 197 to 214, which does not bind CD40 ligand.
[1232] 216. Part or fragment according to any of aspects 197 to 215, which does not bind related TNF family members.
[1233] 217. Part of fragment according to any of aspects 197 to 216, that can specifically bind to RANK-L with a dissociation constant (K_{D}) of 10⁻⁵ to 10⁻¹² moles/litre or less, and preferably 10⁻⁷ to 10⁻¹² moles/litre or less and more preferably 10⁻⁸ to 10⁻¹² moles/litre.
[1234] 218. Part or fragment according to any of aspects 197 to 217, that can specifically bind to RANK-L with a rate of association (kₒₙ-rate) of between 10² M⁻¹s⁻¹ to about 10⁷ M⁻¹s⁻¹, preferably between 10³ M⁻¹s⁻¹ and 10⁷ M⁻¹s⁻¹, more preferably between 10⁴ M⁻¹s⁻¹ and 10⁷ M⁻¹s⁻¹, such as between 10⁵ M⁻s⁻¹ and 10⁷ M⁻¹s⁻¹.
[1235] 219. Part or fragment according to any of aspects 197 to 218, that can specifically bind to RANK-L with a rate of dissociation (k_{off} rate) between 1 s⁻¹ and 10⁻⁶ s⁻¹ preferably between 10⁻² s⁻¹ and 10⁻⁶ s⁻¹, more preferably between 10⁻³ s⁻¹ and 10⁻⁶ s⁻¹, such as between 10⁻⁴ s⁻¹ and 10⁻⁶ s⁻¹.
[1236] 220. Compound or construct, that comprises or essentially consists of one or more parts or fragments according to any of aspects 197 to 219, and optionally further comprises one or more other groups, residues, moieties or binding units, optionally linked via one or more linkers.
[1237] 221. Compound or construct according to aspect 220, in which said one or more other groups, residues, moieties or binding units are amino acid sequences.
[1238] 222. Compound or construct according to any of aspects 220 or 221, in which said one or more linkers, if present, are one or more amino acid sequences.
[1239] 223. Nucleic acid or nucleotide sequence, that encodes a part or fragment according to any of aspects 197 to 219 or a compound or construct according to aspect 222.
[1240] 224. Composition, comprising at least one part or fragment according to any of aspects 197 to 219, compound or construct according to any of aspects 220 to 222, or nucleic acid or nucleotide sequence according to aspect 223.
[1241] 225. Derivative of an amino acid sequence according to any of aspects 1 to 97, or of a Nanobody according to any of aspects 98 to 138.
[1242] 226. Derivative according to aspect 225, that can specifically bind to RANK-L.
[1243] 227. Derivative according to aspect 226, which is directed against and/or can specifically bind to the RANK receptor binding site on RANK-L.
[1244] 228. Derivative according to any of aspects 226 or 227, which is directed against and/or can specifically bind to the intersubunit receptor-binding grooves on the RANK-L trimer.
[1245] 229. Derivative according to any of aspects 226 to 228, which modulates binding of RANKL-L to RANK.
[1246] 230. Derivative according to aspect 229, which inhibits and/or prevents binding of RANKL-L to RANK.
[1247] 231. Derivative according to aspect 230, which inhibits and/or prevents binding of RANKL-L to RANK, while not reducing and/or inhibiting the RANK-L/OPG interaction.
[1248] 232. Derivative according to any of aspects 226 to 231, which is an antagonist of RANK-L
[1249] 233. Derivative according aspect 226, which is directed against and/or can specifically bind to the OPG binding site on RANK-L.
[1250] 234. Derivative according aspects 226 or 233, which modulates binding of RANKL-L to OPG.
[1251] 235. Derivative according to aspect 234, which inhibits and/or prevents the RANK/RANK-L interaction.
[1252] 236. Derivative according to aspect 235, which is an antagonist of RANK-L.
[1253] 237. Derivative according to aspect 234, which does not reduce or inhibit the RANK/RANK-L interaction.
[1254] 238. Derivative according to aspect 237, which is an agonist of RANK-L.
[1255] 239. Derivative according to aspect 226, which prevents and/or inhibits the formation of the RANK-L trimer.
[1256] 240. Derivative according to aspect 226, which prevents and/or inhibits the differentiation and/or proliferation of osteoclasts.
[1257] 241. Derivative according to aspect 226, which modulates bone remodelling.
[1258] 242. Derivative according to any of aspects 226 to 241, which does not bind TRAIL.
[1259] 243. Derivative according to any of aspects 226 to 242, which does not bind TNF-alpha.
[1260] 244. Derivative according to any of aspects 226 to 243, which does not bind CD40 ligand.
[1261] 245. Derivative according to any of aspects 226 to 244, which does not bind related TNF family members.
[1262] 246. Derivative according to any of aspects 226 to 245, that can specifically bind to RANK-L with a dissociation constant (K_{D}) of 10⁻⁵ to 10⁻¹² moles/litre or less, and preferably 10⁻⁷ to 10⁻¹² moles/litre or less and more preferably 10⁻⁸ to 10⁻¹² moles/litre.
[1263] 247. Derivative according to any of aspects 226 to 246, that can specifically bind to RANK-L with a rate of association (kₒₙ-rate) of between 10² M⁻¹s⁻¹ to about 10⁷ M⁻¹s⁻¹, preferably between 10³ M⁻¹s⁻¹ and 10⁷ M⁻¹s⁻¹, more preferably between 10⁴ M⁻¹s⁻¹ and 10⁷ M⁻¹s⁻¹, such as between 10⁵ M⁻¹s⁻¹ and 10⁷ M⁻¹s⁻¹.
[1264] 248. Derivative according to any of aspects 226 to 247, that can specifically bind to RANK-L with a rate of dissociation (k_{off} rate) between 1 s⁻¹ and 10⁻⁶ s⁻¹ preferably between 10⁻² s¹ and 10⁻⁶ s⁻¹, more preferably between 10⁻³ s⁻¹ and 10⁻⁶ s⁻¹, such as between 10⁻⁴ s⁻¹ and 10⁻⁶ s⁻¹.
[1265] 249. Derivative of a compound or construct according to any of aspects 158 to 178.
[1266] 250. Derivative according to aspect 249, that can specifically bind to RANK-L.
[1267] 251. Derivative according to any of aspects 249 to 250, that can specifically bind to RANK-L with a dissociation constant (K_{D}) of 10⁻⁵ to 10⁻¹² moles/liter or less, and preferably 10⁻⁷ to 10⁻¹² moles/liter or less and more preferably 10⁻⁸ to 10⁻¹² moles/liter.
[1268] 252. Derivative according to any of aspects 249 to 251, that can specifically bind to RANK-L with a rate of association (kₒₙ-rate) of between 10² M⁻¹s⁻¹ to about 10⁷ M⁻¹s⁻¹, preferably between 10³ M⁻¹s⁻¹ and 10⁷ M⁻¹s⁻¹, more preferably between 10⁴ M⁻¹s⁻¹ and 10⁷ M⁻¹s⁻¹, such as between 10⁵ M⁻¹s⁻¹ and 10⁷ M⁻¹s⁻¹.
[1269] 253. Derivative according to any of aspects 249 to 252, that can specifically bind to RANK-L with a rate of dissociation (k_{off} rate) between 1 s⁻¹ and 10⁻⁶ s⁻¹ preferably between 10⁻² s¹ and 10⁻⁶ s⁻¹, more preferably between 10⁻³ s⁻¹ and 10⁻⁶ s⁻¹, such as between 10⁻⁴ s⁻¹ and 10⁻⁶ s⁻¹.
[1270] 254. Derivative according to any of aspects 225 to 253, that has a serum half-life that is at least 1.5 times, preferably at least 2 times, such as at least 5 times, for example at least 10 times or more than 20 times, greater than the half-life of the corresponding amino acid sequence according to any of aspects 1 to 97 per se, Nanobody according to any of aspects 98 to 138 per se, polypeptide according to any of aspects 139 to 157, or compound or construct according to any of aspects 158 to 178 per se.
[1271] 255. Derivative according to any of aspects 225 to 254, that has a serum half-life that is increased with more than 1 hours, preferably more than 2 hours, more preferably more than 6 hours, such as more than 12 hours, or even more than 24, 48 or 72 hours, compared to the corresponding amino acid sequence according to any of aspects 1 to 97 per se or Nanobody according to any of aspects 98 to 138 per se, polypeptide according to any of aspects 139 to 157, or compound or construct according to any of aspects 158 to 178 per se.
[1272] 256. Derivative according to any of aspects 225 to 255, that has a serum half-life in human of at least about 12 hours, preferably at least 24 hours, more preferably at least 48 hours, even more preferably at least 72 hours or more; for example, at least 5 days (such as about 5 to 10 days), preferably at least 9 days (such as about 9 to 14 days), more preferably at least about 10 days (such as about 10 to 15 days), or at least about 11 days (such as about 11 to 16 days), more preferably at least about 12 days (such as about 12 to 18 days or more), or more than 14 days (such as about 14 to 19 days).
[1273] 257. Derivative according to any of aspects 225 to 256, that is a pegylated derivative.
[1274] 258. Compound or construct, that comprises or essentially consists of one or more derivatives according to any of aspects 225 to 257, and optionally further comprises one or more other groups, residues, moieties or binding units, optionally linked via one or more linkers.
[1275] 259. Compound or construct according to aspect 258, in which said one or more other groups, residues, moieties or binding units are amino acid sequences.
[1276] 260. Compound or construct according to any of aspects 258 or 259, in which said one or more linkers, if present, are one or more amino acid sequences.
[1277] 261. Nucleic acid encoding one derivative to any of aspects 225 to 257 or a compound or construct according to any of aspects 258 to 260.
[1278] 262. Composition, comprising at least one derivative to any of aspects 225 to 257, compound or construct according to any of aspects 258 to 260, or nucleic acid or nucleotide sequence according to aspects 261.

### BRIEF DESCRIPTION OF THE DRAWINGS

[1279] FIG. 1: Results of competition ELISA with TNFα, TRAIL, CD40L and RANK-L as described in Example 3.2. A: binding of RANKLE Nanobody; B: binding of RANKL9 Nanobody; C: binding of RANKL13 Nanobody; D: binding of RANKL15 Nanobody; E: binding of RANKL18 Nanobody.

[1280] FIG. 2: Results of cell based competition binding assay with monovalent and trivalent anti-RANK-L Nanobodies as described in Example 4.3. A: inhibition with RANKL13 and RANKL130 Nanobodies; B: inhibition with RANKL15 and RANKL150 Nanobodies; C: inhibition with RANKL18 and RANKL180 Nanobodies. Solid line: monovalent Nanobody; Long dashed line: trivalent bispecific Nanobody; Short dashed line: irrelevant Nanobody.

[1281] FIG. 3: The effects of the Nanobodies on the differentiation of human osteoclasts. The results are shown as TRACP 5b values. The groups are: BL=Baseline (no added compounds); C=control (100 ng/ml OPG); A1=0.05 nM; A2=0.3 nM; A3=1 nM; A4=3 nM; A5=10 nM; A6=50 nM; A7=250 nM. The results of all groups were compared separately with the results of the baseline group using one-way ANOVA. Asterisks indicate statistically significant inhibitory effects compared with baseline. All Nanobodies inhibit dose-dependently osteoclast differentiation (***p<0.001). 3-A: RANKL60; 3-B: RANKL130; 3-C: RANK-L180.

[1282] FIG. 4: (A) Serum NTx levels expressed as % change of baseline upon administration of Nanobodies (values below detection limit are not included). (B) Average Serum NTx levels expressed as % change of baseline upon administration of small molecule Ibamdronate (IBN) or of negative control Nanobody ALB-1.

[1283] FIG. 5: Serum BAP levels expressed as % change of baseline upon administration of Nanobodies.

[1284] FIG. 6: Alignment of humanized RANKL13hum5 (SEQ ID NO: 755) to the wild type molecule RANKL13 (SEQ ID NO: 572) and to the first 97 amino acid residues of human germline VH3-23 (SEQ ID NO: 763). Humanized aa residues are indicated in red, while CDR1, 2 and 3 are highlighted in green.

[1285] FIG. 7: Analysis of the potency of RANKL13, RANKL13hum5 and RANKL13hum5_D62E in AlphaScreen assay.

[1286] FIG. 8: Binding of RANK-L130NT and RANKL 008a to immobilized RANK-L. Binding of RANK-L 130NT (light blue) and Rank-L 008a (pink) in the presence of albumin to immobilized Rank-L.

[1287] FIG. 9: Superimposed sensorgrams of binding of RANKL18hum6. RANKL18hum6: binding of 500 nM RANKL18hum6 for 120 seconds. Mixture: binding of 500 nM RANKL18hum6 for 120 seconds followed by injection of a mixture containing 500 nM of RANKL18hum6 and RANKL13hum5.

[1288] FIG. 10: Superimposed sensorgrams of binding of RANKL13hum5. RANKL13hum5: binding of 500 nM RANKL13hum5 for 120 seconds. Mixture: binding of 500 nM RANKL13hum5 for 120 seconds followed by injection of a mixture containing 500 nM of RANKL13hum5 and RANKL18hum6.

[1289] FIG. 11: Inhibition of RANK-L induced differentiation of RAW264.7 cells. RAW264.7 cells (2000 cells/well) were incubated with a dilution series of RANKL008a (), RANKL003p (▪), or an irrelevant Nanobody (▴) and differentiation was induced with 7.5 ng/mL RANK-L. After 4 days, tartrate-resistant acid phosphatase activity in the supernatant was measured. Mean±s.e. of duplicate measurements is shown. Positive controls (i.e. without Nanobody) are indicated using ◯; negative controls (i.e. without RANK-L) are indicated using (□).

[1290] FIG. 12: Inhibition of the RANK-L interaction with RANK. A dilution series of RANKL008a (), RANKL003p (▴) or osteoprotegerin (▾) was incubated with 7.5 ng/mL RANK-L and 200 ng/mL RANK-Fc. The mixtures were transferred to a 96-well plate coated with the anti-Fc Nanobody PMP02. Residual bound RANK-L was detected.

[1291] FIG. 13: Binding of RANKL008a to human serum albumin. 96-well plates were coated with HSA. After blocking, a dilution series of RANKL008a was applied. Bound RANKL008a was detected with a horseradish peroxidase labelled bivalent Nanobody.

[1292] FIG. 14 Bifunctional binding of RANKL008a to HSA and RANK-L. A) Microtiter plates were coated with neutravidin after which biotinylated RANK-L was bound. Wells were incubated with a dilution series of RANKL008a. Bound RANKL008a was detected with horseradish peroxidase labelled albumin. Mean±s.e. of duplicate measurements; B) Microtiter plates were coated with HSA after which a dilution series of RANKL008a was applied. Bound RANKL008a was detected with biotinylated RANK-L followed by horseradish peroxidase labelled streptavidin.

[1293] FIG. 15: Serum NTx levels upon intravenous or subcutaneous administration (3 mg/kg) of RANKL008a (8-A), RANKL001p (8-B) or RANKL003p (8-C) Nanobodies (values below detection limit are not included).

[1294] FIG. 16 Serum NTx levels upon administration (0.3 mg/kg; 0.03 mg/kg) of RANKL008a (9-A), RANKL001p (9-B) or RANKL003p (9-C) Nanobodies (values below detection limit are not included).

[1295] FIG. 17: Cross-reactivity of the Nanobodies with other TNF family members TNFα and TRAIL and with mouse RANK-L.

[1296] FIG. 18: Cross-reactivity of RANKL008a with TNF family members. A titration series of the different TNF superfamily proteins was pre-incubated with 0.08 nM RANKL008a, after which free RANKL008a was captured on a plate with biotinylated sRANK-L and detected with rabbit anti-VHH and anti-rabbit-HRP. The mean OD±s.e. of duplicate measurements is shown.

[1297] A: competition with sRANK-L (), TNF-α (□), TRAIL (▪) and Fas-L (▾)

[1298] B: competition with sRANK-L (), CD40-L (▴), LTα1/β2 (□) and LTα2/β1 (◯)

[1299] C: competition with sRANKL () and LIGHT (□)

[1300] FIG. 19. Inhibition of differentiation of CD14+ monocytes to osteoclasts as measured by intracellular TRACP staining. CD14+ monocytes were isolated from PBMCs and seeded at 100.000 cells/well. Osteoclast differentiation was induced by addition of 50 ng/mL MCSF and 7.5 ng/mL RANKL in the absence (A) or presence (B) of 2 nM RANKL008a. As a control, wells were incubated without RANKL (C). After 11 days of incubation at 5% CO₂ and 37° C. in which 50% of the culture medium was replaced every 2 days by fresh medium, intracellular TRACP was stained. Representative image at 200× magnification is shown.

[1301] FIG. 20: Inhibition of differentiation of CD14+ monocytes to osteoclasts as measured by inhibition of TRACP5b activity in conditioned medium. CD14+ monocytes were isolated from PBMCs and seeded at 100.000 cells/well. A dilution series of RANKL008a was added and differentiation was induced by addition of RANKL (7.5 ng/mL) and MCSF (50 ng/mL). Cells were cultured for 11 days and 50% of the culture medium was replaced every 2 days by fresh medium. Differentiation was assessed by TRACP5b activity measurement in the conditioned medium. Singlicate measurements are shown. As a positive control, the TRACP5b activity measured in the absence of RANKL008a (RANKL+MCSF) is indicated. As a negative control, the TRACP5b activity measured in the absence of MCSF (RANKL−MCSF) or RANKL (MCSF−RANKL) is shown.

[1302] FIG. 21: Inhibition of mRANKL binding to RANK. Microtiter plates were immobilized with the anti-Fc NB PMP02. CHO cells expressing human mRANKL (400.000/mL) were preincubated for 30 min at RT with RANK-Fc (500 ng/mL) in the presence of a dilution series of RANKL008a (), 13H5-CabLys3-13H5 (▴) or CabLys3-Alb11-13H5 (◯) after which the mixtures were transferred to the coated wells. After 2 h of incubation at RT, adhered viable cells were visualized.

[1303] FIG. 22: Differentiation of RAW264.7 cells by mRANKL expressed on CHO cells as measured by total TRACP activity. CHO cells recombinantly expressing human mRANKL were seeded in microtiter plates at a density of 20.000 cells/well and fixed with paraformaldehyde. A dilution series of RANKL008a (), 13H5-CabLys3-13H5 (▴), CabLys3-Alb11-13H5 (◯) or αOPGL-1 (▪) was added after which RAW264.7 cells were added at a density of 2000 cells/well. After 5 days of incubation at 5% CO₂ and 37° C., total TRACP activity in the culture supernatant was measured (mean±s.e., n=3). Total TRACP activity in the absence of compound or in the absence of CHO cells is indicated as dashed lines.

[1304] FIG. 23: Differentiation of RAW264.7 cells by mRANKL expressed on CHO cells as measured by total TRACP activity. WT CHO cells (A) or CHO cells recombinantly expressing human mRANKL (B-C) were seeded in microtiter plates at a density of 20.000 cells/well and fixed. RAW264.7 cells were added at a density of 2000 cells/well in the absence (A-B) or presence (C) of RANKL008a (0.18 nM). After 5 days of incubation at 5% CO₂ and 37° C., intracellular TRACP was stained. Representative image at 200× magnification is shown.

[1305] FIG. 24: Individual plasma concentration-time profiles of RANKL008a (A) and αOPGL-1 (B) following an single i.v. bolus administration at 0.3 mg/kg (RANKL008a) or 1 mg/kg (αOPGL-1) in the female Cynomolgus monkey.

[1306] FIG. 25: Mean serum NTx-time profiles following an single i.v. bolus dose of RANKL008a at 0.3 mg/kg (circles) or of αOPGL-1 at 1 mg/kg (triangles) or PBS (squares) in the female Cynomolgus monkey.

### EXAMPLES

### Example 1

### Identification of RANK-L Blocking Nanobodies

### 1.1 Immunizations

[1307] Two llamas (No. 115 and No. 116) were immunized, according to standard protocols, with 9 intramuscular injections (100 or 50 μg/dose at weekly intervals) of alternating human RANK-L (R&D Systems, Minneapolis, Minn., US) and mouse RANK-L (R&D Systems, Minneapolis, Minn., US) in llama No. 116 and in llama No. 115 for the 5 first injections. The last four injections in llama 115 were only of human RANK-L. Both antigens were formulated in Stimune (Cedi-Diagnostics B.V., Lelystad, The Netherlands). At week 3, sera were collected to define antibody titers against human and mouse RANK-L by ELISA. In short, 96-well Maxisorp plates (Nunc, Wiesbaden, Germany) were coated with human or mouse RANK-L. After blocking and adding diluted sera samples, the presence of anti-RANK-L Nanobodies was demonstrated by using HRP (horseradish peroxidase) conjugated goat anti-llama immunoglobulin (Bethyl Laboratories Inc., Montgomery, Tex. USA) and a subsequent enzymatic reaction in the presence of the substrate TMB (3,3′,5,5′-tetramentylbenzidine) (Pierce, Rockford, Ill., USA). OD_{450 nm} exceeded 1 for human and mouse RANK-L in both animals.

### 1.2 Library Construction

[1308] Peripheral blood mononuclear cells were prepared from the serum samples using Ficoll-Hypaque according to the manufacturer's instructions. Next, total RNA was extracted from these cells and used as starting material for RT-PCR to amplify Nanobody encoding gene fragments. These fragments were cloned into a house made phagemid vector. Phage was prepared according to standard methods (see for example the prior art and applications filed by applicant cited herein) and stored after filter sterilization at 4° C. for further use.

### 1.3 Selections

[1309] Phage libraries obtained from llamas No. 115 and No. 116 were used for different selection strategies.

[1310] In a first selection, biotinylated hRANK-L (expressed in mouse myeloma NS0 cell line) (R&D Systems, Minneapolis, US) at 1, 0.1, 0.01 μg/ml was captured on a neutravidin coated solid phase. Following incubation with the phage libraries and extensive washing, bound phage was aspecifically eluted with trypsin (1 mg/ml).

[1311] In a second selection, soluble biotinylated hRANK-L (R&D Systems, Minneapolis, US) (1 nM, 100 pM, 10 pM) was incubated with the phage libraries. After extensive washing, the biotinylated hRANK-L was captured on a neutravidin coated solid phase. Bound phage was specifically eluted with trypsin (1 mg/ml)

[1312] In a third selection hRANK-L (expressed in E. Coli) (Peprotech, London, UK) was coated onto Maxisorp 96-well plates (Nunc, Wiesbaden, Germany) at 1, 0.1, 0.01 μg/ml. Following incubation with the phage libraries and extensive washing, bound phage was aspecifically eluted with trypsin (1 mg/ml).

[1313] In all selections, enrichment was observed. The output from the selections was recloned as a pool into a house made expression vector. Colonies were picked and grown in 96 deep well plates (1 ml volume) and induced by adding IPTG for Nanobody expression. Periplasmic extracts (volume: ˜80 μl) were prepared according to standard methods (see for example the prior art and applications filed by applicant cited herein).

### 1.4 Screening for RANK-L Blocking Nanobodies in Alphascreen Assay

[1314] The periplasmic extracts were screened in a RANK Alphascreen assay to evaluate the blocking capacity of the expressed Nanobodies. This assay relies on the use of Donor and Acceptor beads which can be conjugated to biological molecules. When a biological interaction between molecules brings the beads into proximity, excited singlet oxygen molecules that are produced upon laser excitation at 680 nm by a photosensitizer in the Donor bead, diffuse across to react with a chemiluminiscer in the acceptor bead that further activates fluorophores which subsequently emit light at 520-620 nm. If the Nanobody inhibits binding of RANK-L to RANK, fluorescent output will decrease, and the amount of Nanobody present will be inversely related to the amount of fluorescence.

[1315] Human RANK-L was biotinylated using biotin (Sigma, St Louis, Mo., US) and biotinamidohexanoic acid 3-sulfo-N-hydroxysuccinimide ester sodium salt (Sigma, St Louis, Mo., US). RANK-huFc chimera (Alexis, Biochemicals, Lausen, Switzerland) was coupled to acceptor beads according to manufacturer instructions (Perkin Elmer, Waltham, Mass., US). To evaluate the neutralizing capacity of anti-hRANK-L Nanobodies, dilution series of the periplasmic extracts were pre-incubated with biotinylated human RANK-L. To this mixture, the acceptor beads and the streptavidin donor beads were added and further incubated for 1 hour at room temperature. Fluorescence was measured by reading plates on the EnVision Multilabel Plate Reader (Perkin Elmer) using an excitation wavelength of 680 nm and an emission wavelength of 520 nm. Decrease in fluorescence signal indicates that the binding of biotinylated RANK-L to the RANK receptor is blocked by the Nanobody expressed in the periplasmic extract.

[1316] From this screening inhibiting Nanobodies were selected and sequenced. Sequencing analysis revealed 12 unique Nanobodies and 10 Nanobody families. The corresponding sequences are depicted in Table C-1 and Table B-1. The sequence of non-inhibitory Nanobodies is shown in Table B-2.

### Example 2

### Characterization of 21 RANK-L Blocking Nanobodies in Alphascreen Assay and ELISA

### 2.1 Nanobody Expression and Purification

[1317] 20 inhibitory Nanobodies selected from the screening described in example 1 were further purified and characterised. Selected Nanobodies were expressed in E. coli as c-myc, His6-tagged proteins in a culture volume of 50 mL. Expression was induced by addition of 1 mM IPTG and allowed to continue for 4 h at 37° C. After spinning the cell cultures, periplasmic extracts were prepared by freeze-thawing the pellets. These extracts were used as starting material for immobilized metal affinity chromatography (IMAC). Nanobodies were eluted from the column with 150 mM imidazole and subsequently dialyzed against PBS.

2.2 Nanobodies Bind to Soluble hRANK-L Coated on Maxisorp 96-Well Plates

[1318] First, biotinylated hRANK-L (200 ng/ml) was captured on neutravidin coated 96-well plates. Therefore 2 μg/ml neutravidin was coated overnight at 4° C. The plates were washed 5 times with 300 μl PBS and then blocked with 300 μl 1% casein/PBS for 2 hours at room temperature. After blocking biotinylated RANK-L (200 ng/ml) was added to the wells and incubated for 1 hour at room temperature. After extensive washing with PBS, varying concentrations of Nanobodies starting from 500 nM to 160 pM diluted in 1% casein/PBS were added to the wells and the plates were incubated for 1 hour at room temperature. Bound Nanobodies were detected by subsequent incubations of a primary mouse anti-myc antibody and a secondary anti mouse-HRP conjugate (DAKO, Glostrup, Denmark) and using TMB-H2O2 (Pierce, Rockford, Ill., USA) substrate cocktail. The reaction was stopped with H2SO4 and the OD was read at 450 nm. All Nanobodies bound to hRANK-L coated on plates in a dose-dependent way. Calculated ED50 values are shown in Table C-2.

[1319] The same panel of Nanobodies was also analysed for binding to murine RANK-L in a similar set-up as described for human RANK-L (see above). Only Nanobody RANKL3 could bind to murine RANK-L in a dose-dependent way with an ED50 of approximately 600 pM.

### 2.3 Nanobodies Block the Binding of RANK-L to its Cognate Receptor RANK in Alpha Screen

[1320] Human RANK-L was biotinylated using biotin (Sigma, St Louis, Mo., US) and biotinamidohexanoic acid 3-sulfo-N-hydroxysuccinimide ester sodium salt (Sigma, St Louis, Mo., US). RANK-huFc chimera (1 nM) (Alexis, Biochemicals, Lausen, Switzerland) were coupled to acceptor beads according to manufacturer instructions (Perkin Elmer, Waltham, Mass., US).

[1321] A dilution series of anti-RANK-L Nanobodies starting from 50 nM up to 1 pM was pre-incubated with 100 pM biotinylated RANK-L during 30 minutes at RT. To this mixture, the RANK acceptor beads and the streptavidin donor beads were added and further incubated for 1 hour at room temperature. Fluorescence was measured by reading plates on the EnVision Multilabel Plate Reader (Perkin Elmer) using an excitation wavelength of 680 nm and an emission wavelength of 520 nm.

[1322] Preincubation of all Nanobodies with biotinylated RANK-L reduced fluorescence intensity at 520 nm, demonstrating that the Nanobodies can effectively inhibit RANK-L binding to RANK in a dose-dependent manner. The calculated IC50 values are shown in Table C-3, and vary from 137 pM for RANKL9 up to 3530 pM for RANKL23.

### Example 3

### Binding Specificity of RANKL 6, 9, 13, 15, 18

### 3.1 RANKL 6, 9, 13, 15, 18 Bind Specifically to Cell Membrane Expressed Human and Cynomolgus RANK-L

[1323] RANK-L of human and cynomolgus monkey was expressed in Human embryonic kidney cells (HEK293T; Wullaert et al. 2007, J. Biol. Chem. 282: 81-90) as the full length, membrane-bound protein. Binding of the Nanobodies to the cell surface expressed RANK-L was assessed by FACS analysis of cells as described below.

[1324] Human embryonic kidney cells (HEK293T) were grown in Dulbecco's modified Eagles's medium supplemented with 10% fetal bovine serum (FBS), 2 nM L-glutamine, 0.4 mM sodium pyruvate. HEK293T cells were transiently transfected with the plasmid expressing full length human or full length cynomolgus RANK-L using Fugene6® and Optimem (Roche Molecular Biochemicals, Indianapolis, Ind., US) according to manufacturer's instructions. After 48 hours, transfected cells were subjected to FACS analysis. Transfectants were seeded in 96-well plates at a final concentration of 5E+06/ml in FACS buffer (PBS+10% FBS) and incubated with varying concentrations of Nanobody (2 nM, 400 pM, 80 pM, 16 pM, 3.2 pM for hRANK-L transfectants; 2 nM, 400 pM for cynomolgus RANK-L transfectants) for 1 hour at 4° C. Then cells were washed three times with FACS buffer. Bound Nanobodies were detected by subsequent incubations of a primary mouse anti Myc antibody (30 min at 4° C. (2 μg/ml)) and a second incubation with goat anti mouse-Phycoerythrin (PE) (Jackson Laboratories) for another 30 min at 4° C. Finally, after washing, the cells were resuspended in PBS+10% FBS+TO-PRO®-3 (5 nM) (Molecular Probes®, Invitrogen, Merelbeke, Belgium) and cell surface fluorescence expressed as mean PE fluorescence, was measured using flow cytometry. All Nanobodies showed dose-dependent binding to both human RANK-L and cynomolgus RANK-L expressed on HEK293T cells at all concentrations tested (Table C-4). Binding was specific since addition of 40 nM soluble human RANK-L to the incubation mixture of 400 pM Nanobody with the HEK293T transfectants abrogated binding of the respective Nanobody to the cells (data not shown).

### 3.2 RANKL 6, 9, 13, 15, 18 do not Bind to TNF Family Members TNFα, CD40 Ligand (CD40L) or TRAIL

[1325] Human OPG has been reported to display weak binding to tumor necrosis factor-related apoptosis inducing ligand (TRAIL). The RANK-L amino acid sequence shows 34% similarity with that of TRAIL.

[1326] In a competition ELISA it was shown that the anti-RANK-L Nanobodies do not bind to TNF family members TNFα, TRAIL and CD40L. RANK-L was coated on 96-well plates as described in example 2. Nanobodies RANKL 6, 9, 13, 15 and 18 (1 nM) were preincubated with varying concentrations of RANK-L, TNFα, CD40L or TRAIL (approximately 100 nM down to 40 pM) before they were added to the plates. Binding of the Nanobodies to the RANK-L coated plates was only inhibited by exogenously added RANK-L and was not affected by the addition of the other ligands (FIG. 1).

### Example 4

### Neutralizing Activity of Trivalent Bispecific Anti RANKL Nanobodies Versus Monovalent Counterparts

### 4.1 Construction and Expression of Trivalent Bispecific Anti-RANK-L Nanobodies

[1327] RANKL3, RANKL6, RANKL9, RANKL13, RANKL15 and RANKL18 were also expressed as trivalent bispecific anti-RANK-L Nanobodies. The trivalent molecules (e.g. RANKL6-ALB1-RANKL6) comprise of two building blocks corresponding to anti-RANK-L Nanobodies with in the middle a third building block corresponding to an anti Human Serum Albumin (HSA) Nanobody building block (ALB-1; SEQ ID NO: 790). The individual building blocks were fused by a Gly/Ser (GGGGSGGGS; SEQ ID NO: 792) linker. The sequences of these trivalent bispecific anti-RANK-L Nanobodies are shown in Table B-3. These constructs were expressed in E. coli as c-myc, His6-tagged proteins and subsequently purified from the culture medium by immobilized metal affinity chromatography (IMAC) and size exclusion chromatography (SEC).

### 4.2 Inhibition by Trivalent Nanobodies of RANK-L Binding to Rank in Alpha-Screen

[1328] 5 trivalent Nanobodies (RANKL30: RANKL3-ALB1-RANKL3; RANKL60: RANKLE-ALB1-RANKLE, RANKL90: RANKL9-ALB1-RANKL9, RANKL130: RANKL13-ALB1-RANKL13, RANKL150: RANKL15-ALB1-RANKL15, RANKL180: RANKL18-ALB1-RANKL18) were compared to their monovalent counterparts in the Alpha-Screen assay to evaluate whether they can also block RANK-L binding to its cognate receptor.

[1329] AlphaScreen was performed as described in Example 2. As shown in Table C-5, all trivalent Nanobodies blocked RANK-L binding to the RANK receptor in a dose dependent way with increased potency as compared to the corresponding monovalent molecules.

### 4.3 Inhibition by Anti-RANK-L Nanobodies of RANK-L Binding to Rank Expressed on HEK293T Cell Membranes

[1330] HEK293T cells were transiently transfected with the plasmid expressing full length RANK using Fugene6 as described in example 3. After 24 hours aliquots of 60 μl (7.5×10³ cells) were plated into FMAT system 384-well plates (PE Biosystems, CA, US) and allowed to adhere for 24 h. After overnight adherence, culture supernatant was removed by gently tapping the plate. To initiate the competitive screen, 20 μl ALEXA⁶⁴⁷-labeled human RANK-L (200 pM final concentration) diluted in PBS+10% BSA (FMAT buffer) and 20 μl of a dilution series (200 nM down to 0.075 pM) of the different monovalent and trivalent Nanobodies were added to the cell-containing FMAT system 384-well plates (PE Biosystems, CA). The plates were scanned after 10 hours of incubation. Cell surface fluorescence was measured by 8200 Cellular Detection System (Applied Biosystems, Foster City, Calif., US) which is a fluorescence macro-confocal, biological binding event analyzer that enables mix-and-read assays with live cells.

[1331] Table C-6 and FIG. 2 show that Nanobodies blocked binding of RANK-L to its receptor in a dose dependent way and that the trivalent formats show increased potency over the monovalent molecules.

### 4.4 Inhibition by Anti-RANK-L Nanobodies of RANK-L Induced NF-KB Activation in HEK293T Cells

[1332] RANK-L stimulated osteoclastogenesis is associated with NF-κB activation. Most likely, RANK-L activates the most common dimer, p50/p65 (Wei et al. 2001, Endocrinology 142(3): 1290-1295). The important role of NF-kB p50 and p52 molecules in osteoclastogenesis has been shown by Xing et al. (2002, J Bone Miner. Res. 17(7): 1200-1210) reporting that NF-κB p50 and p52 are essential for RANK-expressing osteoclast precursors to differentiate into TRAP+ osteoclasts in response to RANK-L. Moreover p50 and p52 double knock out mice reportedly develop severe osteopetrosis due to the inability to generate mature osteoclasts (Franzoso et al. 1998, Genes & Development 11: 3482-3496). All together, RANK-L induced NF-κB activation is important for formation of mature osteoclasts.

[1333] To evaluate the effect of Nanobodies on RANK-L induced NF-κB activation, HEK293T cells were transiently transfected as described in example 3 with a NF-κB reporter gene plasmid and a plasmid encoding β-galactosidase, the latter being used to correct for transfection efficiency. After 24 h, the cells were seeded in 96-well plates. Another 24 h later, cells were left untreated or were incubated in the presence of a constant amount of human RANK-L (300 ng/ml) and varying amounts of the indicated anti-RANK-L Nanobodies (200 nM down to approximately 10 pM). After 6 hours cells were lysed; luciferase (Luc) and β-galactosidase activity were assayed using the Dual-light kit (Tropix/Applied Biosystems, Foster City, Calif., US) according to manufacturer's instructions. Luc values were normalized for β-galactosidase values to correct for differences in transfection efficiency. As shown in Table C-7, all anti-RANK-L Nanobodies inhibit RANK-L induced NF-κB activation in a dose-dependent way. Calculated IC50 values indicate that trivalent Nanobodies are more potent then the corresponding monovalent molecules.

### Example 5

### Inhibition of Osteoclast Formation by Nanobodies

[1334] The effects of the three Nanobodies RANKL60, RANKL130 and RANKL180 on differentiation of human osteoclasts in vitro were investigated.

[1335] The method of osteoclast culture on bone slices was originally described by Boyde and co-workers (1984; Br. Dent J. 156: 216-220) and by Chambers and Horton (1984; J. Pathol. 144: 295-6). Originally, the number of osteoclasts was determined by calculating the number of tartrate-resistant acid phosphatase (TRACP)-positive multinuclear cells under a microscope. Later, it was demonstrated that secreted TRACP 5b activity reflects the number of osteoclasts in mouse osteoclast cultures (Alatalo et al., 2000; Clin. Chem. 46: 1751-4). While secreted TRACP 5b activity correlated strongly with the number of osteoclasts, TRACP 5b was not secreted by TRACP-positive mononuclear osteoclast precursor cells before they had differentiated into mature multinuclear osteoclasts. Therefore, secreted TRACP 5b is a reliable marker of the number of mature multinuclear osteoclasts.

[1336] A human osteoclast differentiation assay was set up in which CD34+ osteoclast precursor cells derived from human bone marrow were cultured for 7 days in the presence of appropriate growth factors, including M-CSF and RANK-ligand, allowing them to differentiate into mature bone-resorbing osteoclasts (Rissanen et al., 2005; Circulation 112: 3937-46).

[1337] Human bone marrow-derived CD34+ stem cells were suspended to culture medium and allowed to attach to bovine bone slices in 96-well tissue culture plates. The culture medium contained appropriate amounts of important growth factors favoring osteoclast differentiation, including M-CSF and RANK-ligand. The cells were incubated in a CO2 incubator in humidified atmosphere of 95% air and 5% carbon dioxide at 37° C. At day 7 when osteoclast differentiation was completed, tartrate-resistant acid phosphatase isoform 5b activity (TRACP 5b) was measured from the culture medium as an index of the number of osteoclasts formed, using the BoneTRAP® assay (IDS Ltd, Boldon, UK) and VICTOR2™ Multilabel Counter (PerkinElmer, Waltham, Mass., USA).

[1338] Seven different concentrations of each Nanobody were tested in this study, ranging from 0.05 nM to 250 nM. A baseline group without Nanobodies and a control group with a reference molecule were included in each cell culture. Osteoprotegerin, an inhibitor of osteoclastogenesis, was used as a reference molecule to demonstrate that the test system can detect inhibition of osteoclast differentiation.

[1339] Baseline TRACP 5b values were high and the reference inhibitor OPG inhibited significantly osteoclast differentiation, which indicates that the assay was performed successfully and the results obtained reliable (FIG. 3). All three Nanobodies inhibited dose-dependently human osteoclast differentiation. All compounds showed a statistically significant inhibition with 3.0 nM and higher concentrations. The inhibition profiles were similar for all three Nanobodies.

### Example 6

### Identification of Residues on RANK-L Involved in the Interaction with the Nanobodies

### 6.1 Construction of Human/Mouse Hybrids

[1340] In order to identify the binding sites of the Nanobodies on the RANK-L molecule, the human RANK-L-specific binding of the Nanobodies was exploited. Except for Nanobody RANKL3, the obtained Nanobodies did not interact with mouse RANK-L. In order to identify residues involved in the species-specific interaction on human RANK-L, three human/mouse hybrids were designed containing human/mouse substitutions in AA′ and CD loops as follows:

AA′ loop:
human/mouse hybrid 1: T¹⁷⁴D¹⁷⁵ were substituted with A and S respectively
CD loop:
human/mouse hybrid 2: D²³¹L²³² were substituted with S and V respectively
human/mouse hybrid 3: A²³³TE²³⁵ were substituted with P and TD respectively

[1341] The human/mouse hybrids were generated by overlap PCR using the primers showed in Table C-8. Amplicons were subsequently cloned as Xho1/Xba1 restriction fragments in an expression vector, pCIneo (Promega, Madison, Wis.).

### 6.2 Binding of Nanobodies to RANK-L Human/Mouse Hybrids

[1342] HEK293T cells were transiently transfected with expression vectors encoding hRANK-L or the human/mouse hybrids. Binding of the Nanobodies (varying concentrations: 250 nM, 50 nM, 10 nM, 2 nM, 0.4 nM, 0.08 nM, 16 pM) to the cell surface expressed RANK-L was assessed by FACS analysis of cells as described above. An overview of the binding results is presented in Table C-9.

[1343] Binding of the human/mouse cross-reactive RANKL3 Nanobody served as a control for expression and correct folding of the different hybrid molecules. As shown in Table C-9, RANKL3 binds to the three different hybrid molecules.

[1344] The binding results with the human-specific Nanobodies can be summarized as follows:
[1345] Loop AA′ is not involved in the species-specific interaction with the Nanobodies.
[1346] Loop CD is crucial for the interaction with the Nanobodies.
[1347] Nanobodies can be subdivided in different classes based on the observed differences in their interaction with the CD Loop.
   [1348] RANKL13, RANKL15: Mutation of the N-terminal part and C-terminal part of the CD-loop abrogates the interaction.
   [1349] RANKL9 and RANKL18: Mutation of the C-terminal part of the CD-loop abrogates the interaction. N-terminal part of the CD-loop is not involved in the interaction.
   [1350] RANKL6: Mutation of the N-terminal part of the CD-loop abrogates the interaction. C-terminal part of the CD-loop is not involved in the interaction.

### Example 7

### Pharmacokinetics and Pharmacodynamics in Cynomolgus Monkeys

[1351] Five males and five female cynomolgus monkeys were assigned to 5 groups, each group consisting of one male and one female. Male individuals were aged between 39 and 42 months, while females had reached the age of 33 to 44 months. The animal's initial body weight varied between 2.5 and 2.7 kg for the male individuals, and 2.2 and 2.6 kg for the female individuals.

[1352] Nanobodies RANKL130 (SEQ ID NO: 715) and RANKL180 (SEQ ID NO: 729) were tested in addition to Nanobody RANKL131 (SEQ ID NO: 643). RANKL131 corresponds to a bivalent Nanobody composed solely of two linker-interconnected RANKL13 building blocks. RANKL131 was included to fully assess the impact of the albumin-binding format on both PK and PD. ALB-1 (SEQ ID NO: 790) was included as a negative control and small molecule Ibandronate (LKT Laboratories, Inc, St. Paul, Minn.) served as a positive control. Animals were dosed as described in Table C-10.

[1353] Serum samples were taken for determination of the Nanobody levels, antibody analysis, and analysis of the bone turnover markers serum N-telopeptide (serum N-Tx) and BAP (bone-specific alkaline phosphatase). Urine was also collected for analysis of N-telopeptide (urine N-Tx) and creatinine.

### 7.1 Pharmacokinetics

[1354] Concentrations of Nanobodies RANKL130, RANKL180 and RANKL131 were determined in plasma as follows: 96-well microtiter plates (Maxisorp, Nunc, Wiesbaden, Germany) were coated overnight at 4° C. with 100 μL neutravidin (2 μg/mL, Pierce, Rockford, Ill.). Wells were aspirated and blocked for 30 min at RT with 300 μL SuperBlock®T20 PBS (Pierce, Rockford, Ill.). After 3 washing steps with PBS-0.05% Tween20, biotinylated RANKL (0.5 μg/mL in PBS-0.1% casein-0.05% Tween20) was captured by incubating 100 μL for 1 hr at RT while shaking at 600 rpm. After this incubation step, wells were washed 3 times with PBS-0.05% Tween20. The standards, QC and predilutions of the test samples were prepared in a non-coated (polypropylene) plate in 100% cynomolgus monkey plasma and incubated for 30 min at RT while shaking at 600 rpm. A 1/10 dilution of the samples and standards in PBS-0.1% casein-0.05% Tween20 (final concentration of cynomolgus monkey plasma is 10%) was transferred to the coated plate and incubated for 1 hr at RT while shaking at 600 rpm. After three washing steps with PBS-0.05% Tween20, the plates were incubated with an in-house purified rabbit anti-Nanobody polyclonal antibody (1 μg/mL in PBS-0.1% casein-0.05% Tween20) for 1 hr at RT while shaking at 600 rpm. After 3 washing steps with PBS-0.05% Tween20, 100 μl horse radish peroxidase (HRP) labeled polyclonal goat anti-rabbit (1/5000 in PBS-0.1% casein-0.05% Tween20, DakoCytomation, Glostrup, Denmark) was incubated for 1 hr at RT while shaking at 600 rpm. Visualization was performed covered from light for 10 min with 100 μL enhanced soluble 3,3′,5,5′-tetramethylbenzidine (esTMB, SDT, Brussels, Belgium), 1/3 diluted in substrate buffer. This substrate buffer was a composition of 60% Na₂HPO₂ (100 mM) and 40% citric acid (100 mM). After 10 min, the colouring reaction was stopped with 100 μL 1N HCl. The absorbance was determined at 450 nm after a 10 sec shake in the Tecan ELISA reader, and corrected for background absorbance at 620 nm. Concentration in each sample was determined based on a sigmoid standard curve.

[1355] Profiles for RANKL130 and RANKL180 plasma concentrations seemed to decline in a triphasic manner. In the first 2.5 days post administration, there was an initial short disposition phase (apparent alpha phase t1/2≈0.5 days), followed by a dominant slower secondary phase (apparent beta phase) and a short final phase (apparent gamma phase) characterized by a change in terminal slope.

[1356] Individual plasma concentration-time profiles of all individuals injected with RANKL130 and RANKL180 were subjected to a non-compartmental pharmacokinetic analysis (NCA) using the pre-programmed Model 201 within WinNonlin Professional Software Version 5.1 (Pharsight Corporation, Mountain View Calif., USA). Individual plasma concentration-time profiles of all animals injected with RANKL131 were analyzed using the pre-programmed Model 202. The area under the plasma concentration-curve (AUC) and derived PK-parameters were calculated by means of the linear-up/log down trapezoidal rule. An overview of the calculated pharmacokinetic parameters is presented in Table C-11 and Table C-12.

[1357] Significant antibody titres to Nanobodies are detected in four out of six animals from the RANKL130, RANKL131 and RANKL180 cohorts. The incidence was not Nanobody-dependent since the four animals that developed antibodies originate from three different cohorts (cyno1m, cyno3m, cyno4f, cyno6f).

### 7.2 Pharmacodynamics

[1358] The discovery of cross-linked N-telopeptides of type I collagen (NTx) has provided a specific biochemical marker of human bone resorption. Generation of the NTx molecule is mediated by osteoclasts on bone and found in urine and serum as a stable end-product of degradation.

[1359] Changes in bone resorption induced by the Nanobodies were assessed by assaying serum NTx and urine NTx using immunoassays according to manufacturer's instructions (Osteomark® NTx serum, Osteomark® NTx urine, Wampole Laboratories).

[1360] RANKL130 and RANKL180 caused a rapid decrease in serum NTx levels (FIG. 4). Maximal inhibition in these two test groups lasted up to at least 40 days. The serum NTx levels started to return to baseline around day 40 for cyno 1m and cyno 6f. In cyno 2f and 5m, the return to baseline initiated on day 45 and day 52, respectively. The less favourable profiles seen for cyno 1m and cyno 6f can be explained by the observed immunogenicity in these animals.

[1361] The suppression of serum NTx profiles induced by RANKL131 in cyno 3m and cyno 4f was transient, as the levels return to baseline by day 8.

[1362] The small molecule drug Ibandronate, which was administered once monthly, induced an overall inhibition of approximately 50% compared to baseline levels.

[1363] Urine NTx levels were measured up to day 16 for the RANKL130, RANKL131 and RANKL180 cohorts. Urine NTx showed similar trends to those of serum NTx.

[1364] Changes in bone formation were assessed by assaying bone-specific alkaline phosphatase (BAP) activity in serum as a quantitative measure and indicator of osteoblastic activity using the Metra® BAP immunoassay. The assay was performed according to manufacturer's instructions. RANKL130 and RANKL180 induced suppression of BAP activity (FIG. 5).

### Example 8

### Humanization of Nanobodies

[1365] Humanized versions of the wild type Nanobodies were assembled from oligonucleotides using a PCR overlap extension method. The sequences of different possible variants of RANKLE, 9, 13, 15 and 18 that were evaluated for their binding capacity and neutralizing activity in Alphascreen and in the biochemical and cellular assays as described in examples 2, 3 and 4 are shown in Table B-5.

### RANKL13

[1366] The amino acid sequence of anti-RANKL Nanobody RANKL13 (SEQ ID NO: 572) was blasted to the human germline V_{H} sequence database using an in-house sequence query/alignment tool (FIG. 6). Human germline VH3-23 (DP-47; SEQ ID NO: 763-764) showed the closest related sequence. Nanobody RANKL13 shows 80 identical and 7 extra conservative amino acid substitutions over the first 97 amino acid residues of human germline VH3-23. 8 amino acid residues (indicated in red) were substituted for humanization purposes to make RANKL13hum5 (SEQ ID NO: 755).

[1367] In the humanization process of RANKL13, five RANKL13 versions (RANKL13basic, RANKL13hum1, RANKL13hum2, RANL13hum3 and RANKL13hum4) were constructed. RANKL13basic contains 4 substitutions: A14P, E44G, V78L and Q108L. In addition to these changes, additional substitutions have been introduced in the hum1-4 versions: RANKL13hum1: R27F; RANKL13hum2: R305; RANKL13hum3: A49S; RANKL13hum4: S91Y. All versions were tested in AlphaScreen assay and binding to RANK-L was analysed by surface plasmon resonance.

[1368] All versions were tested in AlphaScreen assay. Calculated IC50 values in AlphaScreen indicate that the introduced mutations did not affect the potencies of the humanized RANKL13 versions when compared to the wild type RANKL13 (Table C-13).

[1369] Binding kinetics of the humanized versions of Nanobody RANKL13 were also analysed by Surface Plasmon Resonance (Biacore 3000). Human soluble RANK-L was covalently bound to CM5 sensor chips surface via amine coupling using EDC/NHS for activation and HCl for deactivation. Nanobody binding was assessed at one concentration (100 nM). Each Nanobody was injected for 4 minutes at a flow rate of 45 μl/min to allow binding to chip-bound antigen. Next, binding buffer without Nanobody was sent over the chip at the same flow rate to allow spontaneous dissociation of bound Nanobody. From the sensorgrams obtained for the different Nanobodies k_{off}-values (k_{d}) were calculated and are indicated in Table C-13. Association rate constants (kₒₙ or kₐ), and hence also K_{D} values, were only indicative as only 1 concentration of Nanobody was used to fit the binding model. As shown in Table C-13, all humanized Nanobodies showed comparable dissociation rate constants/off rates compared to the wild type Nanobody RANKL13.

[1370] All together, AlphaScreen data and Biacore analysis did not indicate significant effects on binding or potency of the introduced mutations in the respective humanized versions. In a final humanized version, RANKL13hum5, all humanizing mutations were combined. As shown in Table C-13, RANKL13hum5 shows similar potency and binding affinity as the wild type RANKL13.

### RANKL18

[1371] In the humanization process of RANKL18, six RANKL18 versions (RANKL18basic, RANKL18hum1, RANKL18hum2, RANL18hum3, RANKL18hum4 and RANKL18hum5) were constructed. RANKL18basic contains 4 substitutions: A14P, E44G, V78L and Q108L. In addition to these changes additional substitutions were introduced in the hum1-5 versions: RANKL18hum1: R27F; RANKL18hum2: G49S; RANKL18hum3: G60A; RANKL18hum4: P77T and V78L; RANKL18hum5: G94A. All versions were tested in AlphaScreen and Biacore (Table C-13).

[1372] Calculated IC50 values in AlphaScreen indicated that the introduced mutations in RANKL18basic, RANKL18hum3 and RANKL18hum5 did not affect the potencies of these versions compared to the wild type RANKL18 (Table C-13). Humanizing mutations in RANKL18hum1 and RANKL18hum2 influenced moderately the potency while the double mutation in RANKL18hum4 completely abrogated the potency of the Nanobody. Based on these results, two additional mutants, RANKL18hum6 and RANKL18hum7 were constructed and analysed. RANKL18hum6 combines humanizing mutations in RANKL18basic, RANKL18hum3 and RANKL18hum5. RANKL18hum7 includes all mutations of RANKL18hum6 together with V78L substitution. Table C-13 shows that RANKL18hum6 displays similar potency and binding affinity as the wild type RANKL18. RANKL18hum7 is slightly less potent and shows a slightly reduced binding affinity to RANK-L.

### Example 9

### Analysis of RANKL13hum5 D62E Mutant

[1373] Analysis of the primary sequence of RANKL13hum5 identified D62 as a potential site for isomerisation and hence as a potential source for chemical instability of the molecule. To test this possibility, a stability assay was performed with the RANKL13hum5 molecule and a mutant in which the potential isomerisation site is replaced by a glutamic acid residue (E), RANKL13hum5_D62E (SEQ ID NO: 756).

[1374] The D62E mutation in RANKL13hum5 was introduced by overlap PCR using primers including the mutation: RevRANKL13hum5D62 (CCTCCCTTTGACGGATTCCGCGTAATACGT; SEQ ID NO: 797) and FwRANKL13hum5D62E (ACGTATTACGCGGATTCCGTCAAAGGGAGG; SEQ ID NO: 798). Both cDNAs encoding RANKL13hum5 or RANKL13hum5_D62E were cloned as SfiI/BstEII fragments in an expression vector derived from pUC119 which contained the LacZ promoter, a resistance gene for ampicillin or carbenicillin, a multicloning site and the gen3 leader sequence. In frame with the Nanobody coding sequence, the vector coded for two stop codons at the 3′ end of the Nanobody.

[1375] For production, RANKL13hum5 and RANKL13hum5_D62E constructs were inoculated in 50 ml TB/0.1% glucose/Kanamycin and the suspension incubated overnight at 37° C. 5×400 ml medium was inoculated with 1/100 of the obtained overnight preculture. Cultures were further incubated at 37° C., 250 rpm until OD600>5. The cultures were induced with 1 mM IPTG and further kept incubating for 4 hours at 37° C. 250 rpm. The cultures were centrifuged for 20 minutes at 4500 rpm and afterward the supernatant was discarded. The pellets were stored at −20° C.

[1376] For purification, pellets were thawed and re-suspended in 20 mL d-PBS and incubated for 1 hour at 4° C. Then, suspensions were centrifuged at 8500 rpm for 20 minutes to clear the cell debris from the periplasmic extract. Nanobodies were purified via cation exchange (Source 30S column, wash buffer: 10 mM citric acid pH 4.0; Elution buffer 10 mM citric acid/1M NaCl pH 4.0) followed by size exclusion chromatography (Superdex 75 Hiload 16/60 column; in d-PBS). The OD 280 nm was measured and the concentration calculated. Samples were stored at −20 C.

[1377] RANKL13hum5 and RANKL13hum5_D62E were analysed for their binding capacity and neutralizing activity in Alphascreen as described in Example 2. Humanization of RANK13 and D62E mutation in RANKL13hum5 did not interfere with potency of the Nanobody. RANKL13, RANKL13hum5 and RANKL13hum5_D62E displayed similar potencies as measured in AlphaScreen assay (FIG. 7).

### Example 10

### Determination of Size of Linker Lengths in Bivalent Molecules for Optimal Potencies

### RANKL13

[1378] A series of bivalent molecules containing different linker lengths were constructed. RANKL131 (RANKL13-9GS-RANKL13; SEQ ID NO: 643) and RANKL133 (RANKL13-30GS-RANKL13; SEQ ID NO: 766) contain a 9GS or a 30GS linker, respectively. Both molecules were tested in AlphaScreen assay and FMAT assay and compared to the monovalent RANKL13 and the trivalent bispecific RANKL130. Calculated IC50 values are shown in Table C-14. Both assays indicate that a 9GS linker is sufficient to obtain a similar potency as determined for RANKL130.

### RANKL18

[1379] A series of bivalent molecules containing different linker lengths were constructed:

### RANKL181biv: RANKL18-9GS-RANKL18 (SEQ ID NO: 657)

### RANKL182biv: RANKL18-20GS-RANKL18 (SEQ ID NO: 693)

### RANKL183biv: RANKL18-30GS-RANKL18 (SEQ ID NO: 767)

[1380] RANKL18hum6 Bi_{—}25: RANKL18Hum6-25GS-RANKL18Hum6 (SEQ ID NO: 768)
RANKL 18hum6 Bi_{—}30: RANKL18Hum6-30GS-RANKL18Hum6 (SEQ ID NO: 769)

[1381] All molecules were tested in AlphaScreen assay and FMAT assay and compared to the monovalent RANKL18 and the trivalent bispecific RANKL180. Calculated IC50 values are shown in Table C-14. Both assays indicate that a 30GS linker is required to obtain a similar potency as determined for RANKL180.

### RANKL9

[1382] A series of bivalent molecules containing different linker lengths were constructed:

### RANKL91biv: RANKL9-9GS-RANKL9 (SEQ ID NO: 636)

### RANKL92biv: RANKL9-20GS-RANKL9 (SEQ ID NO: 672)

### RANKL93biv: RANKL9-30GS-RANKL9 (SEQ ID NO: 770)

### RANKL94biv: RANKL9-15GS-RANKL9 (SEQ ID NO: 771)

[1383] All molecules were tested in AlphaScreen assay and FMAT assay and compared to the monovalent RANKL9 and the trivalent bispecific RANKL90 (SEQ ID NO: 708) (Table C-14). Both assays indicate that a 15GS linker is sufficient to induce a shift in potency comparable to RANKL90.

### Example 11

### Construction and Production of Different Formats of the Humanized Nanobodies

[1384] Bivalent and trivalent bispecific anti-RANKL Nanobodies were constructed from RANKL13hum5 and RANKL18hum6. An overview of the different formatted humanized Nanobodies with corresponding Nanobody IDs is represented in Table C-15.

### 11.1 Trivalent Bispecific Nanobodies

[1385] The trivalent bispecific molecules (RANKL008a and RANKL010a) have two building blocks corresponding to humanized anti-RANKL Nanobodies with in the middle a third humanized Nanobody building block corresponding to an anti-Human Serum Albumin Nanobody building block (ALB-12; SEQ ID NO: 791). The individual building blocks are fused by a Gly/Ser (GGGGSGGGS; SEQ ID NO: 792) linker.

[1386] RANKL008a was expressed in E. coli and purified from medium and periplasmic extracts. Nanobody was captured on MabSelect Xtra (GE Healthcare, Uppsala, Sweden). Elution occurred with buffer-B (100 mM Glycine pH2.5). Fractions were neutralized with 1.5M Tris pH 7.5 and dialysed against 1/10 PBS. Samples were subsequently subjected to Cation Exchange using a Source 15 S column (GE Healthcare, Uppsala, Sweden).

[1387] RANKL010a was cloned into pPICZalphaA (Invitrogen, Carlsbad, Calif.) and transformed in Pichia pastoris. Colonies were diluted in 250 ml BCGM medium and grown at 30° C. At OD600 of 20-25, cultures were centrifuged and pellet resuspended in 80 ml of BMCM medium. Expression was induced by addition of 100% methanol. Nanobody was captured from the medium by capturing on MabSelect Xtra (GE Healthcare, Uppsala, Sweden). Elution fractions in 100 mM Glycine pH2.5 buffer were neutralised with 1.5M Tris pH 7.5 and dialysed against 1/10 PBS. Sample was further purified by Cation Exchange (Source 30 S column). Finally, a sizing step occurred on Superdex 75 26/60 column.

### 11.2 PEGylated Nanobodies

[1388] Bivalent RANKL13hum5 and RANKL18hum6 were constructed. Constructs were expressed in E. coli. Purification and pegylation was carried out as follows:

Bivalent Nanobody was purified via Protein A affinity chromatography (MabSelect Xtra™) After elution, using 100 mM Glycine pH 2.5, the collected sample was immediately neutralized using 1.5M Tris pH7.5. After a Cation Exchange step (Source 15S column) the fraction containing the Nanobody® was concentrated via Vivaspin (5 kD), DTT was added to a final concentration of 10 mM and incubated over night. After free DTT was removed by SEC, PEG (3-Maleimidoproprionamide, 1,3-bis(Methoxy poly (ethylene glycol) modified 2-glycerol), Average MW 40,000; Nektar Therapeutics, San Carlos, Calif.) was added in a 5 molar excess and incubated overnight. The PEGylated Nanobody was separated from unPEGylated Nanobody/free PEG via MacroCap SP cation exchange (buffer: 25 mM Na-acetate pH5+0.5% pluronic). The bound proteins were eluted with a linear gradient to buffer (1×PBS+0.5% pluronic).

### 11.3 HSA Fusions

[1389] HSA fusion proteins, RANKL004h and RANKL006h, correspond to bivalent RANKL13hum5-9GS-RANKL13hum5 and RANKL18hum6-30GS-RANKL18hum6, respectively, which are C-terminally fused to HSA.

[1390] For the generation of RANKL004h, RANKL13hum5 was amplified by PCR using following primers:

| | SEQ |
|---|---|
| | ID |
| Sequence | NO |
| GAAGTAGGATGGACGATGACAAACCCGCGAAGACTTTTCTGGTG | 807 |
| GCGGGAGCGAGGTGCAGCTGGTGGA | |
| GTTCTATCGGGAAGACTTAGAACCTCCGCCGCCTGAGGAGACGG | 808 |
| TGACCAG | |
| GGGTATCTCTCGAGAAAAGAGAGGTGCAGCTGGTGGAGTCTGGG | 809 |
| TCTCTTCTCCTAGGTCTTTGAATCTGTGGGCGACTTCAGATTTATG | 810 |
| AGCATCTGAGGAGACGGTGACCAG | |

[1391] Subsequent amplicons were digested using appropriate restriction enzymes (N-terminal fragment: BbsI/XhoI and C-terminal fragment: BbsI/Avr II) and were cloned into a XhoI/AvrII opened pPICZalphaA-HSA vector. This vector contains the coding sequence for full length human serum albumin.

[1392] For the generation of RANKL006h, RANKL18hum6 was amplified by PCR using following primers:

| | SEQ ID |
|---|---|
| Sequence | NO |
| GGGTATCTCTCGAGAAAAGAGAGGTTCAGCTAGTGGAATCA | 811 |
| CACCTCCGGATCCTCCACCTCCGCTACCTCCACCTCCACTGCCACCTCCACC | 812 |
| TGAGGAGACGGTGACCAG | |
| GGTGGAGGATCCGGAGGTGGAGGTAGCGGAGGTGGAGGCTCAGGAGGTGG | 813 |
| AGGCAGTGAGGTTCAGCTAGTGGAA | |
| TCTCTTCTCCTAGGTCTTTGAATCTGTGGGCGACTTCAGATTTATGAGCATCT | 814 |
| GAGGAGACGGTGACCAG | |

[1393] Amplicons were digested using appropriate restriction enzymes (N-terminal fragment: BamHI/XhoI and C-terminal fragment: BamHI/Avr II) and were cloned into a XhoI/AvrII opened pPICZalphaA-HSA vector. This vector contains full length human serum albumin.

[1394] Plasmids were transformed to Pichia pastoris. Colonies were diluted in 250 ml BCGM medium and grown at 30° C. Expression was induced by addition of 100% methanol. Nanobodies were purified from the medium by capturing the Nanobodies on MabSelect Xtra (GE Healthcare, Uppsala, Sweden) and further polishing steps using Poros50HQ and Superdex200 XK26/60.

### Example 12

### Characterization of the Formatted Humanized Nanobodies in Alphascreen and FMAT Assay

[1395] 12.1 Potency of the RANKL13hum5 Based Formats in AlphaScreen and FMAT Assay

[1396] Trivalent bispecific Nanobody RANKL008a, pegylated Nanobody RANKL001p and HSA fusion protein RANKL004h were tested in AlphaScreen assay and FMAT assay and compared to the monovalent RANKL13hum5 and the wild type trivalent bispecific RANKL130. Calculated IC50 values are shown in Table C-16. In both assays RANKL008a, RANKL001p and RANKL004h displayed a similar potency that is comparable to that of RANKL130.

12.2 Potency of the RANKL18hum6 Based Formats in AlphaScreen and FMAT Assay

[1397] Trivalent bispecific Nanobody RANKL010a and pegylated Nanobody RANKL003p were tested in AlphaScreen assay and FMAT assay and compared to the monovalent RANKL18hum6 and the wild type trivalent bispecific RANKL180. Calculated IC50 values are shown in Table C-16. In both assays RANKL010a and RANKL003p displayed potencies that are comparable to that of RANKL180.

12.3 Effect of Albumin on Binding Kinetics of RANKL13 with Anti-Human Serum Albumin Nanobody Building Block

[1398] An experiment was performed with wild type RANKL130NT (RANKL13-ALB-1-RANKL13) and humanized RANKL008a (RANKL13hum5-ALB-12-RANKL13hum5). In this experiment a 100 nM solution was passed over a chip with immobilized RANK-L. As shown in FIG. 8, the sensorgrams in the absence of albumin are comparable for both molecules (wild type and humanized) suggesting that both molecules interact in a similar way with immobilized RANKL. Subsequently a mixture was prepared (100 nM of the Nanobody with 500 nM HSA) and passed over the chip. As the signal was significantly higher for the complex, we conclude that both the wild type and humanized variants with anti-Human Serum Albumin Nanobody building block are able to bind to RANK-L and albumin simultaneously.

12.4 Epitope Mapping of RANKL13hum5 and RANKL18hum6.

[1399] In the past, experimental data were generated which supported the statement that RANKL13hum5 and RANKL18hum6 bind to overlapping epitopes. This observation was confirmed in a Biacore experiment. In these epitope mapping experiments the RANKL sensor chip was first saturated with the first Nanobody (concentration of 500 nM). After 120 seconds, dissociation was allowed or a mixture containing the same concentration of the first Nanobody together with 500 nM of the Nanobody to be tested was injected for 120 seconds. In FIG. 9 the sensorgrams for RANKL18hum6 and in FIG. 10 the sensorgrams for RANKL13hum5 are shown. Only a slight increase in signal was observed upon injection of the mixture after saturation of the surface first with either RANKL13hum5 or RANKL18hum, indicating that RANKL13hum5 and RANKL18hum6 bind to overlapping epitopes.

### 12.5 Inhibition of RANK-L Induced Differentiation of RAW264.7 Cells by Formatted Humanized Nanobodies

[1400] RAW264.7 cells (ATCC) were maintained in DMEM containing 10% FBS. Cells were resuspended in alphaMEM without phenol red containing 10% FBS, 0.1% sodium pyruvate, 1% non essential amino acid and seeded at 2000 cells/well in a 96-well plate. A dilution series of the formatted humanized Nanobodies was added to the wells. Differentiation to osteoclast-like cells was induced by adding 7.5 ng/mL RANKL (Peprotech, Rocky Hill, N.J.). The total tartrate-resistant phosphatase activity was measured in the supernatant after 4 days using paranitrophenylphosphate as substrate (FIG. 11).

12.6 Inhibition of RANK-L Interaction with RANK by Formatted Humanized Nanobodies

[1401] 96-well microtiter plates were coated overnight at 4° C. with anti-Fc Nanobody PMP02 and blocked with Superblock T20 (PBS) blocking buffer. Different concentrations of formatted humanized Nanobodies were preincubated with 200 ng/mL RANK-Fc and 5 ng/mL RANK-L after which the mixtures were transferred to the coated wells. Bound RANK-L was detected for 1 h at room temperature (RT) with a 1/100 dilution of Human TRANCE/RANKL/TNFSF11 Biotinylated Affinity Purified polyclonal antibody (R&D systems, Minneapolis, Minn.) in PBS containing 10% Superblock T20 (PBS) blocking buffer followed by a 30 min incubation with horseradish peroxidase labeled streptavidin (1/5000 in PBS containing 10% Superblock T20 (PBS) blocking buffer). Visualisation was performed with 3,3′,5,5′-tetramethylbenzidine (TMB) and hydrogen peroxide after which the coloring reaction was stopped with 1N HCl. The absorbance was determined at 450 nm. The inhibition of the RANK-L interaction with RANK by the formatted humanized Nanobodies is shown in FIG. 12.

### 12.7 Binding of RANKL008a to Human Serum Albumin

[1402] 96-well microtiter plates were coated overnight at 4° C. with human serum albumin (HSA, 20 μg/mL in PBS). Wells were aspirated and blocked with Superblock T20 (PBS) blocking buffer. Wells were incubated for 1 h at RT with a dilution series of RANKL008a. Subsequently, bound RANKL008a was detected with a bivalent Nanobody coupled to horseradish peroxidase. Visualisation was performed as described above (FIG. 13).

### 12.8 Bifunctional Binding of RANKL008a to HSA and RANK-L

[1403] Two different ELISA formats were applied to measure a simultaneous binding of RANKL008a to HSA and RANK-L.

[1404] In a first format, 96-well microtiter plates were coated overnight at 4° C. with neutravidin (2 μg/mL, PBS) and blocked with Superblock T20 (PBS) blocking buffer. Wells were incubated with biotinylated RANK-L (0.5 μg/mL in PBS) after which a dilution series of RANKL008a was applied. Bound RANKL008a was detected with horseradish peroxidase labeled albumin (Genetex, San Antonio, Tex.; 1/6000). Visualisation was performed as described above (FIG. 14-A).

[1405] In a second format, 96-well microtiter plates were coated overnight at 4° C. with HSA (10 μg/mL, PBS) and blocked with Superblock T20 (PBS) blocking buffer. Subsequently, a dilution series of RANKL008a was applied. After 1 h incubation at RT, bound RANKL008a was detected with biotinylated RANK-L (5 ng/mL), followed by an incubation with horseradish peroxidase labeled streptavidin (1/2000). Visualisation was performed as described above (FIG. 14-B).

### Example 13

### Pharmacokinetics of Formatted Humanized Nanobodies in Balb/c Mice after a Single Intravenous or Subcutaneous Administration

[1406] A bolus dose of 100 μg of each Nanobody was administered to male Balb/c mice (8 to 12 weeks) (n=3), either intravenously into the tail or subcutaneously. At a series of time points, blood samples were collected.

[1407] Detection of the different Nanobodies was performed as follows:

Maxisorb microtiter plates (Nunc, Wiesbaden, Germany) were coated for 1 hr at room temperature (RT) with 100 μl of a 5 μg/ml solution of Neutravidine (Pierce, Rockford, Ill.) in PBS buffer. After coating, the plates were aspirated for 4 seconds and blocked (300 μl/well) for 30 min at RT with Superblock T20 (Thermo Scientific Pierce Protein Research Products, Rockford, Ill.). Plates were washed three times with PBS containing 0.05% Tween20. After blocking, biotinylated human RANKL (0.25 μg/ml, 100 μl/well) was captured for 1 hr at RT (600 rpm). Dilution series of the Nanobody standards (prepared in PBS/0.1% casein) were spiked into 100% pooled blank mouse serum (Harlan, Oxon, United Kingdom) and were then further diluted 1/10 with PBS containing 0.1% casein (in separate non-coated plate Nunc), resulting in a final sample matrix consisting of 10% pooled mouse serum. Serum samples were treated in the same way. All pre-dilutions were incubated for 30 minutes at RT (600 rpm) in the non-coated plate. After the capturing step, the coated plates were washed three times (PBS containing 0.05% Tween20), and an aliquot of each sample dilution (100 μl) was transferred to the coated plate and allowed to bind for 1 hr at RT (600 rpm). After sample incubation, the plates were washed three times (PBS containing 0.05% Tween20) and incubated for 1 hr at RT with 100 μl of an in-house polyclonal rabbit anti-Nanobody antibody (1 μg/ml, in PBS/0.1% casein). The plates were then washed three times (PBS containing 0.05% Tween20) and incubated with 100 μl of a 1/2000 dilution (in PBS with 0.1% casein) of goat anti-rabbit HRP (DakoCytomation, Glostrup, Denmark). After incubation for 30 minutes at RT (600 rpm), plates were washed three times (PBS containing 0.05% Tween20) and incubated for 10 minutes in the dark with 100 μl of es(HS)TMB (1/3 dilution in HRP Buffer; SDT, Brussels, Belgium). After 10 minutes, the reaction was stopped with 100 μl HCl (1N). After 5 minutes, the absorbance of each well was measured at 450 nm (Tecan Sunrise spectrophotometer; Männedorf, Switzerland), and corrected for background absorbance at 620 nm. Concentration in each serum sample was determined based on a sigmoidal standard curve with variable slope.

[1408] After iv administration, the serum concentration-time profile of each mouse was subjected to a two-compartmental pharmacokinetic analysis using the pre-programmed Model number 7 within WinNonlin Professional Software Version 5.1 (Pharsight Corporation, Mountain View Calif., USA). Calculated parameters for the individual Nanobodies are shown in Table C-17.

[1409] After sc administration, the serum concentration-time profile of each mouse was subjected to a one-compartmental pharmacokinetic analysis (with first order absorption) using the pre-programmed Model number 3 (no lag time) or 4 (with lag time) within WinNonlin Professional Software Version 5.1 (Pharsight Corporation, Mountain View Calif., USA). Calculated parameters for the individual Nanobodies are shown in Table C-18.

### Example 14

### Pharmacokinetics and Pharmacodynamics of Formatted Humanized Nanobodies in Cynomolgus Monkeys

[1410] Female cynomolgus monkeys were assigned to 17 groups, each group consisting of three individuals aged approximately 24 months.

[1411] Animals were dosed as described in Table C-19. Nanobodies RANKL008a, RANKL001p and RANKL003p were administered at different doses (3 mg/kg; 0.3 mg/kg; 0.03 mg/kg). Nanobody ALB-8 served as a negative control. Small molecule Ibandronate was included as a positive control. Serum samples were taken for determination of the Nanobody levels, antibody analysis, and analysis of the bone turnover marker serum N-telopeptide (serum N-Tx).

### 14.1 Pharmacokinetics

[1412] Concentrations of RANKL008a were determined in plasma as follows:

96-well microtiter plates (Maxisorp, Nunc, Wiesbaden, Germany) were coated overnight at 4° C. with 100 μL neutravidin (2 μg/mL, Pierce, Rockford, Ill.). Wells were aspirated and blocked for 30 min at RT with 300 μL SuperBlock®T20 PBS (Pierce, Rockford, Ill.). After 3 washing steps with PBS-0.05% Tween20, biotinylated RANKL (0.5 μg/mL in PBS-0.1% casein-0.05% Tween20, in-house) was captured by incubating 100 μL for 1 hr at RT while shaking at 600 rpm. After this incubation step, wells were washed 3 times with PBS-0.05% Tween20. The standards, QC and predilutions of the test samples were prepared in a non-coated (polypropylene) plate in 100% Cynomolgus monkey plasma and incubated for 30 min at RT while shaking at 600 rpm. A 1/10 dilution of the samples in PBS-0.1% casein-0.05% Tween20 (final concentration of Cynomolgus monkey plasma is 10%) was transferred to the coated plate and incubated for 1 h at RT while shaking at 600 rpm. After three washing steps with PBS-0.05% Tween20, the plates were incubated with the purified in-house rabbit anti-Nanobody polyclonal antibody (1 μg/mL in PBS-0.1% casein-0.05% Tween20, in-house, Batch No. 15/05/06) for 1 hr at RT while shaking at 600 rpm. After 3 washing steps with PBS-0.05% Tween20, 100 μl horse radish peroxidase (HRP) labeled polyclonal goat anti-rabbit (1/5000 in PBS-0.1% casein-0.05% Tween20, DakoCytomation, Glostrup, Denmark; Article No. P0448) was incubated for 1 h at RT while shaking at 600 rpm. Visualization was performed covered from light for 10 min with 100 μL 3,3′,5,5′-tetramethylbenzidine (esTMB, SDT, Brussels, Belgium). This substrate was 1/3 diluted in substrate buffer. The substrate buffer is a composition of 60% Na₂HPO₂ (100 mM) and 40% citric acid (100 mM). After 10 min, the colouring reaction was stopped with 100 μL 1N HCl. The absorbance was determined at 450 nm after a 10 sec shake in the Tecan ELISA reader, and corrected for background absorbance at 620 nm. Concentration in each sample was determined based on a sigmoidal standard curve.

[1413] Concentrations of RANKL001p and RANKL003p were determined as follows:

96-well microtiter plates (Maxisorp, Nunc, Wiesbaden, Germany; Article No. 430341) were coated overnight at 4° C. with 100 μL neutravidin (2 μg/mL, Pierce, Rockford, Ill.). Wells were aspirated and blocked for 30 min at RT with 300 μL SuperBlock®T20 PBS (Pierce, Rockford, Ill.). After 3 washing steps with PBS-0.05% Tween20, biotinylated RANKL (0.5 μg/mL in PBS-0.1% casein-0.05% Tween20, in-house) was captured by incubating 100 μL for 1 hr at RT while shaking at 600 rpm. After this incubation step, wells were washed 3 times with PBS-0.05% Tween20. The standards, QC and predilutions of the test samples were prepared in a non-coated (polypropylene) plate in 100% Cynomolgus monkey plasma and incubated for 30 min at RT while shaking at 600 rpm. A 1/10 dilution of the samples in PBS-0.1% casein-0.05% Tween20+10% Cynomolgus monkey plasma (final concentration of Cynomolgus monkey plasma was 10%) was transferred to the coated plate and incubated for 1 h at RT while shaking at 600 rpm. After three washing steps with PBS-0.05% Tween20, the plates were incubated with the purified in-house rabbit anti-Nanobody polyclonal antibody (1 μg/mL in PBS-0.1% casein-0.05% Tween20, in-house) for 1 hr at RT while shaking at 600 rpm. After 3 washing steps with PBS-0.05% Tween20, 100 μl horse radish peroxidase (HRP) labeled polyclonal goat anti-rabbit (1/2000 in PBS-0.1% casein-0.05% Tween20, DakoCytomation, Glostrup, Denmark) was incubated for 1 h at RT while shaking at 600 rpm. Visualization was performed covered from light for 10 min with 100 μL 3,3′,5,5′-tetramethylbenzidine (undiluted esTMB, SDT, Brussels, Belgium). After 10 min, the colouring reaction was stopped with 100 μL 1N HCl. The absorbance was determined at 450 nm after a 10 sec shake in the Tecan ELISA reader, and corrected for background absorbance at 620 nm. Concentration in each sample was determined based on a sigmoidal standard curve.

[1414] Individual plasma concentration-time profiles of all monkeys were subjected to a non-compartmental pharmacokinetic analysis (NCA) using WinNonlin Professional Software Version 5.1 (Pharsight Corporation, Mountain View Calif., USA). The pre-programmed Model 200 or 201 was used after subcutaneous and intravenous dosing respectively. The AUC and derived PK-parameters were calculated by means of the linear-up/log down trapezoidal rule. An overview of the calculated pharmacokinetic parameters is presented in Tables C-20 to C-23.

### 14.2 Pharmacodynamics

[1415] Changes in bone resorption induced by the Nanobodies were assessed by assaying serum NTx using immunoassays according to manufacturer's instructions (Osteomark® NTx serum, Wampole Laboratories).

[1416] FIGS. 15 and 16 represent the serum NTx concentration-time plots for the different Nanobodies dosed at different amounts either intravenously or subcutaneously.

[1417] All plasma concentration-time profiles of each Nanobody were fitted simultaneously to the pharmacokinetic function that was minimally necessary to provide a reasonable characterization of the concentration-time data. Only the plasma concentration-time profiles of the monkeys devoid of significant immunogenicity were included in the analysis. A two-compartmental pharmacokinetic model with both linear and non-linear clearance from the central compartment was found to characterize the dose and time dependent pharmacokinetics. In turn, these Nanobody-specific pharmacokinetic functions were used as an input function for the pharmacodynamic model to estimate the in vivo potency (IC₅₀) and intrinsic activity (Iₘₐₓ) on serum NTx turnover.

[1418] The intrinsic activity (Iₘₐₓ) and potency (IC₅₀) of each Nanobody on the serum NTx turnover was described using an indirect response model. The indirect response model was parameterized with the half-life of serum NTx (t_{1/2}=0.693/kₒᵤₜ) and a Nanobody-mediated inhibition (Hill function) on the zero order production rate of NTx (Kᵢₙ). The Nanobodies were assumed to inhibit Kᵢₙ by means of a Hill equation parameterized with Iₘₐₓ, IC₅₀ and a shape factor n. For each Nanobody a single set of PD parameters was estimated, except for RANKL003p where the turnover parameters (Kᵢₙ, Kₒᵤₜ) were allowed to vary for each dose level.

[1419] The obtained pharmacodynamic parameters of all Nanobodies are presented in Table C-24. Although all three Nanobodies had similar intrinsic activity and mediated an almost complete inhibition of serum NTx (Iₘₐₓ≈90), their potency was significantly different. RANKL008a was found to be the most potent inhibitor of serum NTx synthesis, followed by RANKL001p and RANKL003p. RANKL003p had a tenfold lower potency than RANKL008a. The average serum NTx half-life was approximately 1.6 hr.

### Example 15

### Cross-Reactivity of RANKL 130, RANKL180, RANKL008a, RANKL001p and RANKL003p with TNF Family Members TNFα, CD40 Ligand (CD40L) and TRAIL

[1420] The cross-reactivity of the anti-RANK-L Nanobodies with TNF family members TNFα, TRAIL or to mouse RANK-L was tested in a competition ELISA. Human RANK-L was coated on 96-well plates as described in Example 2. Nanobodies (100 pM) were preincubated with varying concentrations of human RANK-L, mouse RANK-L, TNFα or TRAIL (10 nM down to 13.7 pM) before they were added to the plates. Binding of the Nanobodies to the RANK-L coated plates was only inhibited by exogenously added RANK-L and was not affected by the addition of the other ligands (FIG. 17).

### Example 16

### Administration of Anti-RANK-L Nanobodies Prevents Bone Loss and Maintains Strength and Quality in Ovariectomized Cynomolgus Monkeys

[1421] Osteoporosis is characterized by low bone mass and microarchitectural deterioration of bone tissue, with a consequent increase in fragility and susceptibility to fractures. Estrogen depletion contributes to the low bone mass characteristic of postmenopausal osteoporosis. Therefore, estrogen depletion has been used as a bone loss animal model for studying osteoporosis therapies

[1422] One month after OVX or sham surgery, ovariectomized (OVX) cynomolgus monkeys (cynos) (9 to 16 years old) are treated with vehicle or anti-RANK-L Nanobody for 16 months. Sham controls are treated with vehicle. Effects on bone resorption and on bone mineral density (BMD) upon administration of the anti-RANK-L Nanobody are analysed.

[1423] After sacrifice, ex vivo DXA and pQCT scans are taken of the intact right femur, L3-L4 vertebral bodies, and L5-L6 vertebral 5 mm cancellous cores. Destructive testing is performed by 3-point bending of the femur diaphysis and humeral cortical beams, shearing of the femur neck, and compression of the lumbar vertebral specimens.

[1424] The effects of the anti-RANK-L Nanobody on bone turnover at the histologic level, and their relationships with bone strength are analysed as follows: Double fluorochrome labels are injected prior to iliac and rib biopsies (at month 6 and 12), and prior to sacrifice. Histomorphometry is performed on these biopsies, the tibial diaphysis, and cancellous bone in L2 vertebra and the proximal femur.

### Example 17

### Construction and Analysis of VHH-Fc Fusions

[1425] Nanobodies directed against RANK-L are cloned in a suitable vector to generate genetic fusions to the CH1 deleted Fc portion of human IgG1 or of human IgG2. The hinge regions linking the Nanobody to Fc are derived either from IgG1 or IgG2.

[1426] Plasmid constructs are transfected in eukaryotic cell lines and Fc fusion is secreted into the culture supernatant. Products are purified and analysed on a Coomassie stained gel. Representative sequences are depicted in Table B-6 (SEQ ID NO's: 774-789). Nanobody-fusions are tested in FMAT competition binding assay, NF-κB reporter assay and TRACP 5b osteoclast differentiation assays.

### Example 18

### Cross-Reactivity of RANKL008a with TNF Family Members TNF-α, TRAIL, FasL, CD40L, LTα1/β2, LTα2/β1 and LIGHT

[1427] In order to identify human proteins that share sequence similarity with RANK-L, its protein sequence (Genbank accession number CAM23721) was used to search the translated human genome with TBLASTN using the standard settings (BLOSUM62). For the highest scoring sequences, the region corresponding to the CD-loop was compared to RANK-L to assess possible binding of RANKL008a.

[1428] Cross-reactivity of RANKL008a with selected TNF family members was tested via competition ELISA. Ninety six-well microtiter plates (Nunc, Maxisorp) were coated ON at 4° C. with 100 μL of 2 μg/mL neutravidin (Pierce) in PBS. Wells were aspirated and blocked with 300 μL of SuperBlock T20 PBS blocking buffer (Pierce) for 30 min at RT. Wells were washed thrice with 0.05% PBS-Tween, and subsequently incubated with 0.05 μg/mL biotinylated sRANK-L diluted in PBS-Tween for 1 h at RT and 600 RPM. In the mean time, 3.27 ng/mL of RANKL008a was preincubated with a dilution series of TNF receptor family members (RANK-L, TNF-α, TRAIL, FasL, CD40L, LTα1/β2, LTα2/β1 and LIGHT) for 1 h at RT and 600 RPM. The sRANK-L-containing wells were washed 3 times with PBS-Tween and 100 μL of the pre-incubated RANKL008a samples was transferred to the coated plate. After 1 h incubation at RT and 600 RPM, bound RANKL008a was detected for 30 min at RT and 600 RPM with 100 μL of polyclonal rabbit anti-VHH R23 (1 μg/mL in PBS-Tween, Ablynx). The wells were washed as above and incubated for 30 min at RT and 600 RPM with HRP-conjugated polyclonal goat anti-rabbit Ig (0.15 μg/mL in PBS-Tween, DakoCytomation). Visualisation was performed with esTMB for 7 min, after which the reaction was stopped with 1N HCl. The absorbance was determined at 450 nm.

[1429] Binding of the Nanobodies to the plates was only inhibited by exogenously added unlabeled RANK-L and was not affected by the addition of the other ligands (FIG. 18).

### Example 19

### RANKL-Mediated Differentiation of CD14+ Monocytes

[1430] Peripheral Blood Mononuclear cells (PBMCs) were purified from human buffy coats using Ficoll Paque. CD14+ monocytes were isolated using CD14 Microbeads (Miltenyi Biotec) according to the manufacturer's instructions. The CD14+ cell fraction and the CD14-fraction (i.e. the effluent during the separation procedure; cells not attached to the anti-CD14 beads) were seeded at 100.000 cells/well in a 96-well culture plate in αMEM culture medium without phenol red containing 10 vol % FBS, 0.1 vol % penicillin/streptomycin, 0.1 vol % sodium pyruvate and 1 vol % non essential amino acids. After 2 hours incubation at 37° C. and 5% CO₂, Nanobodies were added and differentiation was induced with 7.5 ng/mL recombinant human RANKL and 50 ng/mL human Macrophage colony-stimulating factor (MCSF). Cells were cultured for 11 days and 50 vol % of the culture medium was replaced every 2 days by fresh medium. Differentiation was assessed by cytochemical staining for intracellular TRACP performed after fixation in 3.7% formaldehyde in acetone using the Leukocyte Acid Phosphatase kit (Sigma). Moreover, TRACP 5b isoform activity in the culture medium was performed using the BoneTRAP™ assay (Immunodiagnostic Systems) according to the manufacturer's instructions.

[1431] RANKL008a completely blocked RANKL-mediated differentiation of CD14+ monocytes to osteoclasts. Indeed, in the presence of effective concentrations of RANKL008a, RANKL-induced intracellular TRACP staining was inhibited (FIG. 19). Moreover, RANKL-induced TRACP5b activity in conditioned medium was completely blocked (FIG. 20). In the absence of RANKL or MCSF, baseline TRACP5b activity was measured, as expected.

### Example 20

### Inhibition of Membrane RANKL (mRANKL) Interaction with RANK-Fc

[1432] Interaction of mRANKL with RANK was measured using a cell adhesion assay. For this purpose, Chinese Hamster Ovary (CHO) cells which are expressing recombinant membrane-bound human RANKL were used. Cells were maintained in RPMI containing Glutamax, 25 mM Hepes and 10 vol % FBS.

[1433] 96-well white polystyrene plates (Corning) were immobilized with the anti-Fc Nanobody PMP02 (5 μg/mL in sodium bicarbonate buffer pH 9.6). Wells were blocked with PBS containing 3% BSA for 1 h at RT and washed with PBS. Cells were detached with non-enzymatic dissociation buffer and resuspended in RPMI1640 medium. After 30 min incubation at RT of cells (400.000/mL) with 500 ng/mL RANK-Fc in the presence or absence of Nanobodies or controls, the mixtures were transferred to the coated wells. After 2 h incubation at RT, wells were washed once with PBS and adhered cells were visualized using the luminescent-based CellTiter Glo® reagent for cell viability (Promega) according to the manufacturer's instructions.

[1434] RANKL008a could concentration-dependently and completely block the interaction of mRANKL with RANK-Fc (FIG. 21). A clear shift in potency was observed for CabLys3-Alb11-13H5 (SEQ ID NO: 815) compared to RANKL008a, while 13H5-CabLys3-13H5 (SEQ ID NO: 816) displayed similar activity.

### Example 21

### Inhibition of mRANKL Mediated Osteoclast Differentiation

[1435] Osteoclast differentiation mediated by mRANKL was investigated using a coculture assay in which RAW264.7 cells were stimulated with recombinant membrane bound human RANKL expressed on CHO cells. RAW264.7 cells and CHO cells were maintained as described above. CHO cells were detached using non-enzymatic dissociation buffer and resuspended in RPMI1640 containing 10 vol % FBS and 1 vol % penicillin/streptomycin. CHO cells were seeded at a density of 20.000 cells/well in a 96-well microtiter plate and incubated for 24 h at 37° C. and 5% CO₂. Cells were washed 3 times with PBS and subsequently fixed in a solution of 3.7% paraformaldehyde in PBS. A dilution series of Nanobodies or controls was added to the wells. Subsequently, wells were incubated with RAW264.7 cells for 5 days at 37° C., 5% CO₂ and at a density of 2000 cells/well in αMEM culture medium without phenol red containing 10 vol % FBS, 0.1 vol % penicillin/streptomycin, 0.1 vol % sodium pyruvate and 1 vol % non essential amino acids. Differentiation was assessed by either cytochemical staining for intracellular TRACP or TRACP activity measurements in the conditioned medium as described above (FIGS. 22 and 23).

### Example 22

### Pharmacokinetics and Pharmacodynamics of RANKL008a vs. αOPGL-1 in Cynomolgus Monkeys

[1436] RANKL008a was expressed in Pichia pastoris and purified on SP Sepharose as a capturing step and a Q filter as a polishing step or on SP Sepharose as a capturing step and Capto MMC as a polishing step (GE Healthcare Life Sciences). Concentration of the Nanobody and buffer switch to PBS was done via UF/DF (Sartorius Hydrosart Sartocon Slice 200, 10 kDa). A final filtration was carried out at 0.22 μm.

[1437] The amino acid sequence of the monoclonal antibody αOPGL-1 is described in SEQ ID NO's: 2 and 4 of US2004/0033535. αOPGL-1 was expressed in CHO-K1SV cells (Lonza) and purified on MabSelect Sure as a capturing step and Source30S as a polishing step (GE Healthcare Life Sciences).

[1438] Female Cynomolgus monkeys (3 animals per test compound) received a single i.v. bolus administration of RANKL008a at 0.3 mg/kg or αOPGL-1 at 1 mg/kg. An additional three female monkeys were dosed with PBS and served as negative control.

[1439] Blood samples were processed to plasma for determination of the Nanobody levels and antibody analysis. In addition, blood samples were collected and processed to serum for the analysis of the bone turnover marker serum N-telopeptide (serum N-Tx).

### 22.1 Bioanalytical Determination of RANKL008a and αOPGL-1

### 22.1.1 Determination of RANKL008a Plasma Concentrations

[1440] Plasma concentrations of RANKL008a were determined in plasma using a RANKL-independent ELISA. In short, 96-well microtiter plates (Maxisorp, Nunc, Article No. 430341) were coated overnight at 4° C. with 100 μl of an in-house made anti-Nanobody Nanobody at a concentration of 3 μg/ml in bicarbonate buffer (15 mM Na₂CO₃, 35 mM NaHCO₃, pH9.6). Wells were aspirated and blocked for 30 min at room temperature (RT) with 300 μl SuperBlock®T20 (PBS) (Pierce, Article No. 37516, Lot# JG121073). The standard curve stock solution and the QC samples were prepared in a low adhesion plate (Nunc Article No. 24994) in 100% pooled Cynomolgus plasma (Sera Laboratories International; SLI# FF109188/209188; catalog# PSCIM-118-M; aliquoted on 3oct2008) and incubated for 1 h at RT while shaking at 600 rpm. A 1/20 dilution of the standard stock solution, QCs and test samples were made in PBS/0.1% casein (resulting in a 5% final plasma concentration). Further dilutions of the calibrators and test samples were made in PBS/0.1% casein supplemented with 5% plasma. After the 1/20 dilution, test samples were further diluted in order to bring them into the dynamic range. The 5% plasma solutions were incubated at RT and 600 rpm for 30 minutes. 100 μl/well was transferred to the coated and blocked plate and incubated for 2 hr at RT while shaking at 600 rpm. The plates were washed 3 times with PBS/0.05% Tween20. 100 μl of an in-house made anti-Nanobody Nanobody at 250 ng/ml in PBS/0.1% casein was added per well and plates were incubated for 1 h at RT while shaking at 600 rpm. Plates were washed 3 times with PBS/0.05% Tween20. 100 μl strep-HRP (1/10000 in PBS/0.1% casein, Dako: P0397; Batch no 00032671) was added per well and plates were incubated for 30 min at RT while shaking at 600 rpm. Again, plates were washed 3 times with PBS/0.05% Tween20 and 100 μl of the 3,3′,5,5′-tetramethylbenzidine substrate (es(HS)TMB (SDT-reagents)) 1/3 diluted in substrate buffer (HRP buffer: 60% 100 mM Na₂HPO₄.2H₂O, 40% citric acid, pH 4.3)) was added per well. The colouring reaction was allowed to proceed for 15 minutes at RT in the dark, after which the reaction was stopped by adding 100 μl 1N HCl per well. The absorbance was determined at 450 nm after a 10 seconds shake in the Tecan ELISA reader, and corrected for background absorbance at 620 nm. The concentration in each sample was determined based on a 4 parameter logistic fit of the standard curve.

[1441] The assay was validated and assay range was verified to be between 25 to 600 ng/ml on plasma level. All samples were analysed in duplicate and a reported value was generated by calculating an average concentration from the replicates from the lowest dilution factor. All assays generating a reported value passed the 4/6/20 rule on freshly prepared QC samples (% bias and % CV of 4 out of 6 QC samples should be ≦20% with least 50% of the QC samples passing this criterion at each concentration level). If the 4/6/20 rule was not met or the % CV of the duplicate study samples was >20%, no reported value was generated and the samples were re-analyzed. Incurred sample re-analysis, performed on 10% of the study samples showed that reported values did not differ more than 30% upon re-analysis.

### 22.1.2 Determination of αOPGL-1 Plasma Concentrations

[1442] Plasma concentrations of αOPGL-1 were determined using ELISA as described below.

[1443] 96-well microtiter plates (Maxisorp, Nunc, Article No. 430341) were coated overnight at 4° C. with 100 μl neutravidin (Thermo Scientific, Prod#31000, Lot# JC122585, stock conc: 2 mg/ml) at a concentration of 2 μg/ml in PBS (Phosphate buffered saline). Wells were aspirated and blocked for 30 min at room temperature (RT) with 300 μl PBS/1% casein (casein: Calbiochem; catalog nr: 218682). Afterwards plates were washed 3 times with PBS/0.05% Tween20 and 100 μl biotinylated RANKL (Peprotech, Cat# 310-01; biotinylated in-house) was added per well. The plates were incubated for 1 h at RT while shaking at 600 rpm. The standard curve stock solution and the QC samples were prepared in a low adhesion plate (Nunc Article No. 24994) in 100% pooled Cynomolgus plasma (Sera Laboratories International; SLI# FF109188/209188; catalog#PSCIM-118-M; aliquoted on 3oct2008) and incubated for 1 h at RT while shaking at 600 rpm. A 1/20 dilution of the standard stock solution, QCs and test samples was made in PBS/0.1% casein (resulting in a 5% final plasma concentration). Further dilutions of the calibrators and test samples were made in assay diluents (PBS/0.1% casein supplemented with 5% plasma). If needed, test samples were further diluted to bring them into the dynamic range of the assay. The 5% plasma solutions were incubated at RT and 600 rpm for 30 minutes. 1000/well was transferred to the bio-RANKL containing plate and incubated for 2 h at RT while shaking at 600 rpm. The plates were washed 3 times with PBS/0.05% Tween20. 100 μl of rabbit anti-human IgG-HRP (Dako; P0214; Lot#012(101); 1/20000 in PBS/0.1% casein) was added per well and plates were incubated for 1 h at RT while shaking at 600 rpm. Plates were washed 3 times with PBS/0.05% Tween20 and 100 μl of the 3,3′,5,5′-tetramethylbenzidine substrate (ES TMB (SDT-reagents) 1/3 diluted in substrate buffer (60% 100 mM Na₂HPO₄.2H₂O, 40% citric acid, pH 4.3)) was added per well. The colouring reaction was allowed to proceed for 15 minutes at RT in the dark, after which the reaction was stopped by adding 100 μl 1N HCl per well. The absorbance was determined at 450 nm after a 10 seconds shake in the Tecan ELISA reader, and corrected for background absorbance at 620 nm. The concentration in each sample was determined based on a 4 parameter logistic fit of the standard curve.

[1444] The assay was validated and the assay range was verified to be between 60 to 800 ng/ml on plasma level. All samples were analysed in duplicate and a reported value was generated by calculating an average concentration from the replicates from the lowest dilution factor. All assays generating a reported value passed the 4/6/25 rule on freshly prepared QC samples (% bias of 4 out of 6 QC samples should be <25% with least 50% of the QC samples passing this criterion at each concentration level). If the 4/6/25 rule was not met or the % CV of the duplicate study samples was >20%, no reported value was generated and the samples were re-analyzed. Incurred sample re-analysis, performed on 10% of the study samples showed that reported values did not differ more than 30% upon re-analysis.

### 22.2 Determination of Anti-Drug Antibodies

### 22.2.1 Determination of Anti-Drug Antibodies Against RANKL008a in the Plasma of the Cynomolgus Monkeys

[1445] Cynomolgus monkey plasma was screened for anti-drug antibodies against RANKL008a and its building blocks as described below.

[1446] Selected monkey plasma samples at predose and at various time points after RANKL008a administration were screened for the presence of anti-drug antibodies using an ELISA-based direct detection titration assay. 96-well microtiter plates (Maxisorp, Nunc, Article No. 430341) were coated overnight at 4° C. with either RANKL008a (Pichia produced as described above; 1.42 mg/ml), the RANKL13H5 building block or the Alb8 building block, each at a concentration of 5 μg/mL in bicarbonate buffer (15 mM Na₂CO₃ (1.59 g/l)+35 mM NaHCO₃ (2.93 g/l) in 11, pH 9.6) (100 μL per well). Wells were aspirated and blocked for 30 minutes at room temperature (RT) with 300 μL SuperBlock®T20(PBS) (Pierce, Article No. 37516, Lot#JG121073). Afterwards plates were washed 3 times with PBS/0.05% Tween20. Plasma test samples and positive controls (plasma collected from Cynomolgus monkey with positive response to Nanobody) were prepared in a low adhesion plate (Nunc Article No. 249944) by a first 1/50 dilution step, followed by a 1/3 dilution series in 6 steps in PBS/0.1% casein/0.05% Tween20. 100 μl/well samples and controls were transferred to the coated plate and were allowed to bind for 1 h at RT while shaking at 600 rpm. Negative control for each plate was PBS/0.1% casein/0.05% Tween20 (buffer). The plates were washed 3 times with PBS/0.05% Tween20. 100 μL of Rabbit anti-Monkey IgG-Bio (1/5000 in PBS/0.1% casein/0.05% Tween20; Nordic Immunology; RAMon/IgG(H+L)/Bio (5086)) was added per well and plates were incubated for 30 min at RT while shaking at 600 rpm. Afterwards plates were washed 3 times with PBS/0.05% Tween20 and 100 μl streptavidin-HRP (1/5000 in PBS/0.1% casein/0.05% Tween20; Dako; P0397; Lotnr.00047645) was added per well. Plates were incubated for 30 min at RT while shaking at 600 rpm. Again, plates were washed 3 times with PBS/0.05% Tween20 and 100 μl of the 3,3′,5,5′-tetramethylbenzidine substrate (ES TMB (SDT-reagents) 1/3 diluted in substrate buffer (60% 100 mM Na₂HPO₄.2H₂O, 40% citric acid, pH 4.3)) was added per well. The colouring reaction was allowed to proceed for 15 minutes at RT in the dark, after which the reaction was stopped by adding 100 μl 1N HCl per well. The absorbance was determined at 450 nm after a 10 seconds shake in the Tecan ELISA reader, and corrected for background absorbance at 620 nm.

[1447] The titer was determined as the highest dilution factor at which the OD level was above threshold. The threshold was defined as the mean of the negative controls multiplied by 2.

### 22.2.2. Determination of Anti-Drug Antibodies Against αOPGL-1 in the Plasma of the Cynomolgus Monkey

[1448] Cynomolgus monkey plasma was screened for anti-drug antibodies against αOPGL-1 as described below.

[1449] Selected monkey plasma samples at predose and at various time points after αOPGL-1 administration were screened for the presence of anti-drug antibodies (IgG isotype) using an ELISA-based bridging assay. 96-well microtiter plates (Maxisorp, Nunc, Article No. 430341) were coated overnight at 4° C. with αOPGL-1 (at a concentration of 5 μg/mL in PBS (Phosphate-buffered saline) buffer (10 PBS tablets (Oxoid//BR0014G) per litre MQ) (100 μL per well). Wells were aspirated and blocked for 30 min at room temperature (RT) with 300 μL SuperBlock®T20(PBS) (Pierce, Article No. 37516, Lot#JG121073). Afterwards plates were washed 3 times with PBS/0.05% Tween20. Plasma test samples were prepared in a low adhesion plate (Nunc Article No. 249944) by a 1/2 dilution step in PBS/0.1% casein. 100 μl/well samples were transferred to the coated plate and allowed to bind for 1 h at RT while shaking at 600 rpm. Negative control for each plate was PBS/0.1% casein (buffer). The plates were washed 3 times with PBS/0.05% Tween20. 100 μL of biotinylated αOPGL-1 at a concentration of 1 μg/mL in PBS/0.1% casein was added per well and plates were incubated for 30 min at RT while shaking at 600 rpm. Afterwards plates were washed 3 times with PBS/0.05% Tween20 and 100 μl streptavidin-HRP (1/5000 in PBS/0.1% casein; Dako; P0397; Lotnr.00047645) was added per well and plates were incubated for 30 min at RT while shaking at 600 rpm. Again, plates were washed 3 times with PBS/0.05% Tween20 and 100 μl of the 3,3′,5,5′-tetramethylbenzidine substrate (ES TMB (SDT-reagents) 1/3 diluted in substrate buffer (60% 100 mM Na₂HPO₄.2H₂O, 40% citric acid, pH 4.3)) was added per well. The colouring reaction was allowed to proceed for 15 minutes at RT in the dark, after which the reaction was stopped by adding 100 μl 1N HCl per well. The absorbance was determined at 450 nm after a 10 seconds shake in the Tecan ELISA reader, and corrected for background absorbance at 620 nm.

### 22.3 Determination of Serum NTX Levels

[1450] For determination of the serum NTx levels in the serum of the Cynomolgus monkeys the Osteomark® NTx Serum kit (Wampole Laboratories, Princeton, N.J., USA) was used for the quantitative measure of cross-linked N-telopeptides of type I collagen (NTx) in serum, being an indicator for bone resorption.

[1451] This Osteomark® NTx Serum kit is a competitive-inhibition enzyme-linked immunosorbent assay (ELISA) in which a synthetic NTx epitope is adsorbed onto a 96-well microplate. Diluted samples are added to the microplate wells, followed by a horseradish peroxidase labeled monoclonal antibody. NTx in the sample competes with the NTx epitope coated to the wells of the microplate. Following a wash step, the amount of bound labeled antibody is measured by the colorimetric generation of a peroxide substrate. Absorbance is determined spectrophotometrically and NTx concentration calculated using a standard calibration curve with purified NTx antigen. Assay values are reported in nanomoles Bone Collagen Equivalents per liter (nM BCE).

### 22.4. Data Analysis

### 22.4.1 Pharmacokinetic Data Analysis

[1452] Descriptive statistics (mean and SD) were calculated per dose group and per sampling time point using Microsoft Excel 2007. In case all three values were below the quantification limit (BQL), BQL was reported. When one or two out of three values were BQL, BQL values were set to zero and the mean calculated.

[1453] Individual plasma concentration-time profiles were subjected to non-compartmental analysis (NCA) (Model 201; i.v. bolus injection) using WinNonlin Pro 5.1 (Pharsight Corporation, USA; 2006). The area under the curve (AUC) was estimated using the lin up/log down rule. LLOQ values were treated as missing, except when comprised between two values above the LLOQ, then they were set to zero. The concentration at time zero (C0) was estimated through back-calculation based on the two first data points. The terminal elimination half-life (t½) was calculated automatically (best-fit) using a log-linear regression of the non-zero concentration-time data of the log-linear portion of the terminal phase. A minimum of three points were considered for the determination of λz.

[1454] The following main pharmacokinetic parameters were estimated: plasma concentration at time zero (C0); the area under the plasma concentration-time curve extrapolated to infinity (AUCinf), total body clearance (CL), volume of distribution at steady-state (Vdss), and the dominant half-life (t_{1/2}).

### 22.4.2 Pharmacodynamic Data Analysis

[1455] Descriptive statistics (mean and SD) were calculated per dose group and per sampling time point using Microsoft Excel 2007.

[1456] Response parameters and associated statistics for the overall time course were calculated by noncompartmental analysis of the response-time data using WinNonlin Pro 5.1 (Pharsight Corporation, USA; 2006). The non-compartmental analysis was based on a model for pharmacodynamic data (Model 220). As threshold value 30% readout was considered. The following main pharmacodynamic parameters were determined: time below the threshold (Time below T), area under the threshold (AUC below threshold), time at which the serum NTx first drops below the threshold (tonset), and time at which the serum NTx first returns back above the threshold (toffset).

### 22.5 Results

### 22.5.1 Immunogenicity Evaluation

[1457] Immunogenicity was observed in all animals. However, in combination with PK and PD data, only one animal from the αOPGL-1 treated-animals displayed evident signs of immunogenicity, which likely have impacted the PK/PD data. This animal was therefore not considered in subsequent PK and PD analyses.

### 22.5.2 Pharmacokinetics

[1458] In FIG. 24, the mean plasma concentration time profiles of RANKL008a and αOPGL-1 following an single i.v. bolus administration at 0.3 mg/kg (RANKL008a) or 1 mg/kg (αOPGL-1), respectively in the female Cynomolgus monkey are presented.

[1459] After i.v. injection of RANKL008a, the plasma levels of RANKL008a dropped fairly rapidly up to about 1 day post-dose, corresponding to the distribution phase of the compound. Thereafter the drug levels dropped gradually with two distinct elimination phases. The dominant half-life was ca 8 days.

[1460] After i.v. injection of αOPGL-1, plasma concentrations of αOPGL-1 also dropped quite rapidly up to about 1 day post-dose, related to the distribution phase of the compound. After the distribution phase, αOPGL-1 levels dropped more gradually with two distinct elimination phases. The half-life of the dominant phase was ca 6 days.

[1461] In Table C-25 the main pharmacokinetic parameters of RANKL008a and αOPGL-1 following an single i.v. bolus administration with RANKL008a at 0.3 mg/kg or αOPGL-1 at 1 mg/kg in the female Cynomolgus monkey are listed.

### 22.5.3 Pharmacodynamics

[1462] In FIG. 25, the temporal time profiles of serum NTx concentrations following a single i.v. bolus administration at 0.3 mg/kg (RANKL008a) or 1 mg/kg (αOPGL-1) in the female Cynomolgus monkey are shown.

[1463] The main pharmacodynamic parameters of RANKL008a and αOPGL-1 following a single i.v. bolus dose of RANKL008a at 0.3 mg/kg or αOPGL-1 at 1 mg/kg in the female Cynomolgus monkey are listed in Table C-26,

[1464] Pharmacodynamic serum NTx sample analysis demonstrated that animals treated with the RANKL008a (0.3 mg/kg) or αOPGL-1 (1 mg/kg) displayed a rapid drop in serum NTx levels (mean T onset of 0.143 and 0.125 d, respectively in Table C-26). The maximum effect was observed at 8 d post-dose for RANKL008a and somewhat later (11 d post-dose) after αOPGL-1 administration. (Tmin values in Table C-26). After its maximum effect serum Ntx levels slowly returned to baseline. The time below the threshold (Time below T) was fairly comparable (RANKL008a: 19 d; αOPGL-1: 17 d) after dosing with RANKL008a (0.3 mg/kg IV) and αOPGL-1 (1 mg/kg IV). Animals administered with PBS also showed a small but transient drop in serum NTx levels. This drop was however never below the threshold value (30% of the baseline value) and was rather procedure related than a true test-item related effect.

### TABLES

TABLE B-1

Preferred Nanobodies against RANK-L (inhibitors of RANK/RANK-L
interaction)

<Name, SEQ ID #; PRT (protein); ->
Sequence
>RANKL1 | 051_RANKL1c125 | 9B1, SEQ ID NO: 560; PRT; ->
EVQLVESGGGLVQAGGSLRLSCAVSGRTFSSSTMAWFRQPPGGERDFVASISTSGTRTLYADSVKGRFTISR
DNAKSTGYLQMNSLKPEDTAVYFCAAVNRRGWEFWRLASGYDYWGLGAQVTVSS
>RANKL2 | 051_RANKL2c15 | 2B9, SEQ ID NO: 561; PRT; ->
EVQLVESGGGLVQPGGSLRLSCAASGFTFSSYYMSWVRQAPGKGLEWVSSIYSDGSTTDYADSVKGRFTISR
DNAKNTLNLQMNSLKSEDTAVYYCAKDANSGGLEYDYWGQGTQVTVSS
>RANKL3 | 051_RANKL3c11 | 2G8, SEQ ID NO: 562; PRT; ->
EVQLVESGGKLVQAGGSLRLSCAVSGRTSSIYNMAWFRQGPGKGRESVGRIYWSDDNTYYADSVKGRFTISR
DNATNTVYLQMNSLKPEDTAVYYCAGKTTKWSLEYDYWGQGTQVTVSS
>RANKL4 | 051_RANKL4c123 | 4F12, SEQ ID NO: 563; PRT; ->
KVQLVESGGGLVQTGDSLRLSCAASGRAIGSYAMGWFRQAPGKEREFVAVINYRGSSLKYADRVKGRFTISR
DNAKNMVYLQMNSLKPDDTAVYYCAAQTSGADFGTTPQRYTYWGQGTQVTVSS
>RANKL5 | 051_RANKL5c110 | 4G8, SEQ ID NO: 564; PRT; ->
EVQLVESGGGLVQAGGSLRLSCAASGRTIGGHTMAWFRQAPGKERDFVATITSSGSTIFYADSVKGRFTISR
DNGKKTMTLEMDSLKPEDTAVYYCAARIRGKVTVDNFDYAYWGQGTQVTVSS
>RANKL6 | 051_RANKL6c18 | 4H9, SEQ ID NO: 565; PRT; ->
EVQLVESGGGLMQTGGSLRLSCAASGVTYSYYTASWFRQAPGKEREFVAAISPSGNTYYADSVKGRFTISRD
NGKHTMYLQMNSLNPEDTAVYFCAIRATDSIYYASSYRHWGQGTQVTVSS
>RANKL7 | 051_RANKL7c113 | 7B4, SEQ ID NO: 566; PRT; ->
EVQLVESEGGPVQSGGSLRLSCAASGRTFSVSTIAWFRQAPGEGREFVAAIYPSGRNAYVADSVKGRFTISR
DNAKKTVYLQMNSLKPEDTAAYYCAAHQPSGSYYSAEAYAYWGQGTQVTVSS
>RANKL8 | 051_RANKL8c128 | 7E, SEQ ID NO: 567; PRT; ->
EVQLVESGGGSVQPGGSLRLSCAASGGTFSRYAMGWFRQAPGKEREFVSAISVGGTYQYYVDSVKGRFTISR
DNAESTVYLQMNSLKPEDTAVYYCAGDASPYGYLREYTATRFDYWGQGTQVTVSS
>RANKL9 | 051_RANKL9c132 | 8A11, SEQ ID NO: 568; PRT; ->
EVQLVESGGGLVQAGGSLRLTCAASGRTFRSYAMGWFRQAPGKEREFVAAINYSGGSTNYADSVKGRFTISR
DNAKNTLYLQMNSLEPEDTAVYYCAAGSGYASLSYYSTERAYTYWGQGTQVTVSS
>RANKL10 | RANKLPMP9B3 | 9B3, SEQ ID NO: 569; PRT; ->
EVQLVESGGGLVQAGGSLRLSCAASGITFSSRTMGWFRQAPGKEREFVAAITPSSRTTYYADSVKGRFTISR
DNAKNTVLLQMNSLKPEDTAVYYCAAERTYGSNYTRPTAWNYWGQGTQVTVSS
>RANKL11 | 051_RANKL11c116 | 9F10, SEQ ID NO: 570; PRT; ->
EVQLVESGGSLVQAGGSLRLSCAASGRTFSSKTMGWFRQPPGNEREFVAAITPTSRTTYYADSVKGRFTISR
DNAKNTVSLQMNSLKFEDTAAYYCVAVRRYGSPPHDGSSYEYWGQGTQVTVSS
>RANKL12 | 051_RANKL12c11 | 9B6, SEQ ID NO: 571; PRT; ->
EVQLVESGGGWMQAGGSLRLSCAASGRTFTMAWFRQAPGKEREFVAAITGSGRSTYYTDSVKGRFTISRDNA
KNTAYLQMKSLKPEDTAVYYCAGLRGLGLEYDSAKSYSYWGQGTQVTVSS
>RANKL13 | 051_RANKL13c11 | 1C7, SEQ ID NO: 572; PRT; ->
EVQLVESGGGLVQAGGSLRLSCAASGRTFRSYPMGWFRQAPGKEREFVASITGSGGSTYYADSVKGRFTISR
DNAKNTVYLQMNSLRPEDTAVYSCAAYIRPDTYLSRDYRKYDYWGQGTQVTVSS
>RANKL14 | 051_RANKL14c11 | 6B8, SEQ ID NO: 573; PRT; ->
EVQLVESGGGLVQAGGSLRLSCAASGRTSSYYTMSWFRQDPGKEREFVAAVPLSGNTYYADPVRGRFTISRD
NAKNTADLQMNSLKPEDTAVYYCAARASGSIYNRGSYAYWGQGTQVTVSS
>RANKL15 | 051_RANKL15c11 | 7C5, SEQ ID NO: 574; PRT; ->
EVQLVESGGGLVQAGGSLRLSCAAAGGTFRNYVMGWFRQAPGKEREFVTAISTGGSWTGYVDSVKDRFTISR
DNTKNTVYLQMASLKPEDTAVYYCAATTPATTYLPRSERQYDYWGQGTQVTVSS
>RANKL15 | 051_RANKL16c11 | 7G8, SEQ ID NO: 575; PRT; ->
EVQLVESGGGLVQAGGSLRLSCVASRRTFSSYAMGWFRQVPGKERDFVAAISTGSITIYGDSVKGRFTISRD
NAKNTVYLQMNSLKPEDTAVYYCAAGKREPYLRQYTASNPYDYWGQGTQVTVSS
>RANKL17 | 051_RANKL17c11 | 9C2, SEQ ID NO: 576; PRT; ->
EVQLVESGGGLVQVGDSLRLSCEASGRSRFSTYVMGWFRQAPGKEREFVAAVSWSSGNAYYIDSAKGRFATS
RDTAKNIMYLQMNSLKPEDTAVYTCAAGRGYGLLSEYTQAPRYDYWGQGTQVTVSS
>RANKL18 | 051_RANKL18c11 | 7F11, SEQ ID NO: 577; PRT; ->
EVQLVESGGGLVQAGGSLRLSCAASGRTFSRSAMGWFRQAPGKEREFVGFITGSGGTTYYGESVKGRFTISR
DNAQNPVYLQMNSLKPEDTAVYYCGVYRRTYISSTYSESSEYDYWGQGTQVTVSS
>RANKL19 | 051_RANKL19c11 | 6C8, SEQ ID NO: 578; PRT; ->
EVQLVESGGGLVQAGDSLRLSCAASGRTVTMGWFRQAPGKEREFVASITGSGSVTNYADSVKGRFTISRDNA
KNTVFLQMNSLKPEDTAVYYCAAYLPSPYYSSYYDSTKYEYWGQGTQVTVSS
>RANKL20 | 051_RANKL20c11 | 2F4, SEQ ID NO: 579; PRT; ->
EVQLVESGGGLVQAGDSLRLSCAASGRTFTMGWFRQAPGTEREFVAAISGSGKITNYADSVKGRFTISRDHA
KNTVFLQMDSLKPEDTAVYYCAGYLRSPYYSSFYDSAKYEYWGQGTQVTVSS
>RANKL21 | 051_RANKL21c11 | 7C6, SEQ ID NO: 580; PRT; ->
EVQLVESGGGLVQAGGSLRLSCVASRRTFNSYAVGWFRQVPGEERDFVAAISTGSVTIYADSVKGRFTISRD
NAKNTVYLQMNSLKPEDTAVYYCAAGNREPYLRQYTASNPYDYWGQGTQVTVSS
>RANKL22 | 051_RANKL22c12 | 7D12, SEQ ID NO: 581; PRT; ->
EVQLVESGGGLMQTGGSLRLSCAASERTSRNYGMGWFRQAPGKEREFVAAITSAGGTTYYGDFVKGRFTISR
DSAKYTVYLQMNSLKPEDTAVYWCAAKLQIGGRWHNLNDYGYRGQGTQVTVSS
>RANKL23 | 051_RANKL23c11 | 9H5, SEQ ID NO: 582; PRT; ->
EVQLVESGGGLVQAGGSLRLSCAASGLTTVYTMAWFRQAPGKEREFVAAITRSGKTTYYADSVKGRFTISRD
NAKNTVNLQMNSLKPDDTAVYYCAAKALLGMTNPAGYEYWGQETQVTVSS
>RANKLPMP4B3, SEQ ID NO: 584; PRT; ->
evqlvesgggwmqaggslrlscaasgrtftMAwfrqasgkerefvaAITGSGRSTYYTDSVKGrftisrdna
kntaylqmkslkpedtavyycagLRGLGLEYDSAKSYSYwgqgtqvtvss
>RANKLPMP2E11, SEQ ID NO: 585; PRT; ->
EVXLVESGGGLVQAGGSLRLSCAASGRTFRSYPMGWFRQAPGKEREFVASITGSGGSTYYADSVKGRFTISR
DNAKNTVYLQMNSLRPEDTAVYSCAAYIRPDTYLSRDYRKYDYWGQGTQVTVSS
>RANKLPMP2A6, SEQ ID NO: 586; PRT; ->
evqlvesggglvqaggslrlscaasgltssRYTMSwfrqdpgkerefvaAVPLSGNTYYADPVRGrftisrd
nakntvdlqmnslkpedtavyycaaRASGSIFNRGSYAYwgqgtqvtvss
>RANKLPMP1F2, SEQ ID NO: 587; PRT; ->
evqlvesggglvpaggslrlscaasgltdrRYTMSwfrqdpgkerefvaAVPLSGNTYYADPVRGrftisrd
nakntvdlqmnslkpedtavyycaaRASGSIFNRGSYAYwgqgtqvtvss
>RANKLPMP2D4, SEQ ID NO: 588; PRT; ->
evqlvesggglvpaggslrlscaasgltdrRYTMSwfrqdpgkerefvaAVPLSGNTYYADPVGSrftisrd
nakntvdlqmnslkpedtavyycaaRASGSIFNRGSYAYwgqgtqvtvss
>RANKLPMP7B2, SEQ ID NO: 589; PRT; ->
evqlvesggglvqaggslrlscaaaggtfrNYVMGwfrqapgkerefvtAISTGGSWTGYVDSVKDrftisr
dntkntvylqmaslkpedtavyycaaTMPATTYLPRSERQYDYwgqgtqvtvss
>RANKLPMP7A11, SEQ ID NO: 590; PRT; ->
evqlvesggglvqaggsltlscaaagftfrRYVMGwfrqapgkerefvaAISTGGTWTGYVDSVKDrftisr
dntkntvylqmaslkpedtavyncaaTTPTTSYLPRSERQYEYwgqgtqvtvss
>RANKLPMP7F1, SEQ ID NO: 591; PRT; ->
evqlvesggglvqaggslrlscaaagctfrNYVMGwfrqapgkerefvtAISTGGTWTSYVDSVKDrftisr
dntkntvnlqmaslkpedtavyycaaTTPTTSYLPRSERQYEYwgqgtqvtvss
>RANKLPMP7H5, SEQ ID NO: 592; PRT; ->
evqlvesggglvqaggslrlscaaaggtfrNYVMGwfrqapgkerefvaAISTGGSWTGYVDSVKDrftisr
dntkntvylqmvslkpedtavyycaaTTPATTYLPRSERQYDYwgqgtqvtvss
>RANKLPMP7E7, SEQ ID NO: 593; PRT; ->
evqlvesggglvqaggslrlscaaaggtfrNYVMGwfrqapgkerefvtAISAGGSWTGYVDSVKDrftisr
dntkntvylqmaslkpedtavyycaaTTPATTYLPRSERQYDYwgqgtqvtvss
>RANKLPMP7E2, SEQ ID NO: 594; PRT; ->
evqlvesggglvqaggslrlscaaagytfrAYVMGwfrqapgkerefvaGISTGGTWTGYVDSVKDrftisr
dntkntvylqmaslkpedtavyycaaTTPVTSYLPRSERQYEHwgqgtqvtvss
>RANKLPMP3H10, SEQ ID NO: 595; PRT; ->
evqlvesggglvqsggslrlscaaagytfrARAYVMGwfrqapgkerefvaAISTGGTWTGYVDSVKDrfti
srdntkntmylqmaslkpedtavyycaaTTPSTSYLPRSERQYEYwgqgtqvtvss
>RANKLPMP7F9, SEQ ID NO: 596; PRT; ->
evqlvesggglvqaggslrlscvasrrtfsSYAMGwfrqvpgkerdfvaAISTGSITIYGDSVKGrftisrd
nakntvylqmnslkpedtavyycaaGKREPYLRQYTASNPYDYwgqgtqvtvss
>RANKLPMP7E6, SEQ ID NO: 597; PRT; ->
evqlvesggglvqaggslrlscvaskrtfaSYAMGwfrqvpgkerdfvaAITTGSITIYADSVKGrfaisrd
nakntvylqmnslkpedtavyycaaGNREPYLRQYTASNPYDYwgqgtqvtvss
>RANKLPMP4F4, SEQ ID NO: 598; PRT; ->
evqlvesggglvqvgdslrlsceasgrsrfSTYVMGwfrqapgkerefvaAVSWSSGNAYYIDSAKGrfats
rdtaknimylqmnslkpedtavytcaaGRGYGLLSEYTQAPRYDYwgqgtqvtvss
>RANKLPMP7B11, SEQ ID NO: 599; PRT; ->
evqlvesggglvqvgdslrlsceasgrsrfSTYVMGwfrqapgkerefvaAISWSSGNAYYlDSAKGrfats
rdtaknimylqmnslkpedtavyscaaGRGYGLLSEYlQAARYDYwgqgtqvtvss
>RANKLPMP9H9, SEQ ID NO: 600; PRT; ->
evqlvesggglvqaggslrlscaasgrtfsRSAMGwfrqapgkerefvgFITGSGGTTYYGESVKGrftisr
dnaqnpvylqmnslkpedtavyycgvYRRTYISSTYSESSEYDYwgqgtqvtvss
>RANKLPMP9G3, SEQ ID NO: 601; PRT; ->
evqlvesggglvqaggslrlscaasgrtfsRSAMGwfrqapgkerefvgFITGSGGTTYYGESVKGrftisr
dnaqnpvylqmnslkpedtavyycavYRRTYISSTYNESSEYDYwgqgtqvtvss
>RANKLPMP9E3, SEQ ID NO: 602; PRT; ->
evqlvesggglvqaggslrlscaasgrtfsRSAMGwfrqapgkerefvgFITGSGGTTYYGESVKGrftisr
dnaqnpvylqmnslkpedtavyycgvYRRTYISSTYSESSEYDYwgqgtqvtvss
>RANKLPMP7H9, SEQ ID NO: 603; PRT; ->
evqlvesggglvqaggslrlscaasgrtfsRSAMGwfrqapgkerefvgFITGSGGTTYYGESVKGrftisr
dnaqnpvylqmnslkpedtavyycgvYRRTYISITYSESSDYDYwgqgtqvtvss
>RANKLPMP4C3, SEQ ID NO: 604; PRT; ->
evqlvesggglvqaggslrlscaasgrtfsISAMGwfrqapgkerefvcFITGSGGTTYYGESVKGrftisr
dnaqnpvylqmnslkpedtavyycgvYRRTYISSTYSESSEYDYwgqgtqvtvss
>RANKLPMP9G6, SEQ ID NO: 605; PRT; ->
evqlvesggglvqaggslrlscaasgrtfsRSAMGwfrqapgkerefvgFITGSGGTTYYGESVKGrftisr
dnaqnpvylqmnslkpedtavyycgvYRRTYISSTYSESSEYDYwgqgtqvtvss
>RANKLPMP7B12, SEQ ID NO: 606; PRT; ->
evqlvesggglvqaggslrlscaasgrtfsRSAMGwfrqapgkerefvgFITGSGGTTYYGESVKGrftisr
dnaqnpvylqmnslkpedtavyycgvYRRTYISSTYSESSEYDYwgqgtqvtvss
>RANKLPMP7G3, SEQ ID NO: 607; PRT; ->
evqlvesggglvqaggslrlscaasgrtfsRSAMGwfrqapgkerefvgFITGSGGTTYYGESVKGrftisr
dnaqnpvylqmnslkpedtavyycavYRRTYISSTYNESSEYDYwgqgtqvtvss
>RANKLPMP9C12, SEQ ID NO: 608; PRT; ->
evqlvesggglvqaggslrlscaasgrtfsRSAMGwfrqapgkerefvgFITGSGGTTYYGESVKGrftisr
dnaqnpvylqmnslkpedtavyycgvYRRTYISSTYSESSEYDYwgqgtqvtvss
>RANKLPMP1D8, SEQ ID NO: 609; PRT; ->
evqlvesggglvqagdslrlscaasgriftMGwfrqapgkerefvaAISGSGSITNYADSVKGrftisrdya
kttvflqmnslkpedtavyycaaYVRTPYYSSYYDSTKYEYwgqgtqvtvss
>RANKLPMP1A2, SEQ ID NO: 610; PRT; ->
evqlvesggglvqagdslrlscaasgrtftMGwfrqapgkerefvaFISGSGSVTNYTDSVKGrftisrdha
kntvflqmnslkpedtavyycaaYLRGPYYSSFYDSTKYEYwgqgtqvtvss
>RANKLPMP1E5, SEQ ID NO: 611; PRT; ->
evqlvesggglvqagdslrlscaasgrtftMGwfrrapgterefvaSISGSGKITNYADSVKGrftisrdha
knavflqmdglkpedtavyycaaYLRSPYYSSYYDSAKYEYwgqgtqvtvss
>RANKLPMP2B8, SEQ ID NO: 612; PRT; ->
evqlvesgggsvqagdslrlscaasgrtftMGwfrqapgterefvaAISGSGKITNYADSVKGrftisrdha
mntvflqmdslkpedtavyycaaYLRSPYYSSYYDSAKYEYwgqgtqvtvss
>RANKLPMP2C5, SEQ ID NO: 613; PRT; ->
evqlvesggglvqagdslrlscaasgrtftMGwfrqapgterefvaAISGSGKITNYADSVKGrftisrdha
kntvflqmdslkpedtavyycaaYLRSPYYSSYYDSAKYEYwgqgtqvtvss
>RANKLPMP2B4, SEQ ID NO: 614; PRT; ->
evqlvesggglvqagdslrlscaasgrtftMGwfrqapgterefvaAISGSGKITNYADSVKGrftisrdha
kntvflqmdslkpedtavyycaaYLRSPYYSSYYDSAKYEYwgqgtqvtvss
>RANKLPMP2A5, SEQ ID NO: 615; PRT; ->
evqlvesggglvqagdslrlscaasgrtftMGwfrqapgterefvaAISGSGKITNYADSVKGrftisrdha
kntvflqmdslkpedtavyycaaYLRSPYYSSYYDSAKYEYwgqgtqvtvss
>RANKLPMP2D7, SEQ ID NO: 616; PRT; ->
evqlvesggglvqagdslrlscaasgrtftMGwfrqapgterefvaAISGSGKITNYADSVKGrftisrdha
kntvflqmdslkpedtavyycaaYLRSPYYSSYYDSAKYEYwgqgtqvtvss
>RANKLPMP2G4, SEQ ID NO: 617; PRT; ->
evqlvesggglvqagdslrlscaasgrtftMGwfrqapgterefvaAISGSGKITNYADSVKGrftisrdha
kntvflqmdslkpedtavyycaaYLRSPYYSSYYDSAKYEYwgqgtqvtvss
>RANKLPMP7A8, SEQ ID NO: 618; PRT; ->
emqlvesggglvqaggslrlscvaskrtfaSYAMGwfrqvpgkerdfvaAISTHSITVYADSVKGrftisrd
nakntvylqmntlkpedtavyycaaGNREPYLRQYlASNPYDYwgqgtqvtvss
>RANKLPMP7A5, SEQ ID NO: 619; PRT; ->
evqlvesggglvqtggslrlscvasrrtfsSYAVGwfrqvpgkerdfvaAISTGSVTIYADSVKGrftisrd
ntkntvylqmnslkpedtavyycaaGNREPYLRQYTASNPYDYwgqgtqvtvss
>RANKLPMP7F8, SEQ ID NO: 620; PRT; ->
EVQLVESGGGLVQAGGSLRLSCAAAGGTFRNYVMGWFRQAPGKEREFVTAISTGGSWTGYVDSVKDRFTISR
DNTKNTVYLHMASLKPEDTAVYYCAATTPVTTYLPRSERQYDYWGQGTQVTVSS
>RANKLPMP7F6, SEQ ID NO: 621; PRT; ->
EVQLVESGGGLVQAGDSLRLSCAAAGFTFRRYVMGWFRQAPGKEREFVAAISTGGTWTGYVDSVKDRFTISR
DNTKNTVYLQMASLKPEDTAVYNCAATTPTTSYLPRSERQYEYWGQGTQVTVSS

TABLE B-2

Preferred Nanobodies against RANK-L (non-inhibitors of RANK/RANK-L
interaction)

<Name, SEQ ID #; PRT (protein); ->
Sequence
>RANKL3D4 | 051_RANKL3D4c12 | 3D4, SEQ ID NO: 583; PRT; ->
EVQLVEAGGGLVQAGDSLRLSCAASGRTIRGTMAWFRQAPGKDREFVATVTSSGSTTFYADSVKGRFTISRD
NAENTVNLQMDSLKPEDTAVYYCAARIRGKVTPSNYDYAYWGQGTQVTVSS

TABLE B-3

Bivalent Nanobodies against RANK-L

<Name, SEQ ID #; PRT (protein); ->
Sequence
>RANKL3-9GS-RANKL3, SEQ ID NO: 622; PRT; ->
EVQLVESGGKLVQAGGSLRLSCAVSGRTSSIYNMAWFRQGPGKGRESVGRIYWSDDNTYYADSVKGRFTISR
DNATNTVYLQMNSLKPEDTAVYYCAGKTTKWSLEYDYWGQGTQVTVSSGGGGSGGGSEVQLVESGGKLVQAG
GSLRLSCAVSGRTSSIYNMAWFRQGPGKGRESVGRIYWSDDNTYYADSVKGRFTISRDNATNTVYLQMNSLK
PEDTAVYYCAGKTTKWSLEYDYWGQGTQVTVSS
>RANKL3-9GS-RANKL6, SEQ ID NO: 623; PRT; ->
EVQLVESGGKLVQAGGSLRLSCAVSGRTSSIYNMAWFRQGPGKGRESVGRIYWSDDNTYYADSVKGRFTISR
DNATNTVYLQMNSLKPEDTAVYYCAGKTTKWSLEYDYWGQGTQVTVSSGGGGSGGGSEVQLVESGGGLMQTG
GSLRLSCAASGVTYSYYTASWFRQAPGKEREFVAAISPSGNTYYADSVKGRFTISRDNGKHTMYLQMNSLNP
EDTAVYFCAIRATDSIYYASSYRHWGQGTQVTVSS
>RANKL3-9GS-RANKL9, SEQ ID NO: 624; PRT; ->
EVQLVESGGKLVQAGGSLRLSCAVSGRTSSIYNMAWFRQGPGKGRESVGRIYWSDDNTYYADSVKGRFTISR
DNATNTVYLQMNSLKPEDTAVYYCAGKTTKWSLEYDYWGQGTQVTVSSGGGGSGGGSEVQLVESGGGLVQAG
GSLRLTCAASGRTFRSYAMGWFRQAPGKEREFVAAINYSGGSTNYADSVKGRFTISRDNAKNTLYLQMNSLE
PEDTAVYYCAAGSGYASLSYYSTERAYTYWGQGTQVTVSS
>RANKL3-9GS-RANKL13, SEQ ID NO: 625; PRT; ->
EVQLVESGGKLVQAGGSLRLSCAVSGRTSSIYNMAWFRQGPGKGRESVGRIYWSDDNTYYADSVKGRFTISR
DNATNTVYLQMNSLKPEDTAVYYCAGKTTKWSLEYDYWGQGTQVTVSSGGGGSGGGSEVQLVESGGGLVQAG
GSLRLSCAASGRTFRSYPMGWFRQAPGKEREFVASITGSGGSTYYADSVKGRFTISRDNAKNTVYLQMNSLR
PEDTAVYSCAAYIRPDTYLSRDYRKYDYWGQGTQVTVSS
>RANKL3-9GS-RANKL15, SEQ ID NO: 626; PRT; ->
EVQLVESGGKLVQAGGSLRLSCAVSGRTSSIYNMAWFRQGPGKGRESVGRIYWSDDNTYYADSVKGRFTISR
DNATNTVYLQMNSLKPEDTAVYYCAGKTTKWSLEYDYWGQGTQVTVSSGGGGSGGGSEVQLVESGGGLVQAG
GSLRLSCAAAGGTFRNYVMGWFRQAPGKEREFVTAISTGGSWTGYVDSVKDRFTISRDNTKNTVYLQMASLK
PEDTAVYYCAATTPATTYLPRSERQYDYWSQSTQVTVSS
>RANKL3-9GS-RANKL18, SEQ ID NO: 627; PRT; ->
EVQLVESGGKLVQAGGSLRLSCAVSGRTSSIYNMAWFRQGPGKGRESVGRIYWSDDNTYYADSVKGRFTISR
DNATNTVYLQMNSLKPEDTAVYYCAGKTTKWSLEYDYWGQGTQVTVSSGGGGSGGGSEVQLVESGGGLVQAG
GSLRLSCAASGRTFSRSAMGWFRQAPGKEREFVGFITGSGGTTYYGESVKGRFTISRDNAQNPVYLQMNSLK
PEDTAVYYCGVYRRTYISSTYSESSEYDYWGQGTQVTVSS
>RANKL6-9GS-RANKL3, SEQ ID NO: 628; PRT; ->
EVQLVESGGGLMQTGGSLRLSCAASGVTYSYYTASWFRQAPGKEREFVAAISPSGNTYYADSVKGRFTISRD
NGKHTMYLQMNSLNPEDTAVYFCAIRATDSIYYASSYRHWGQGTQVTVSSGGGGSGGGSEVQLVESGGKLVQ
AGGSLRLSCAVSGRTSSIYNMAWFRQGPGKGRESVGRIYWSDDNTYYADSVKGRFTISRDNATNTVYLQMNS
LKPEDTAVYYCAGKTTKWSLEYDYWGQGTQVTVSS
>RANKL6-9GS-RANKL6, SEQ ID NO: 629; PRT; ->
EVQLVESGGGLMQTGGSLRLSCAASGVTYSYYTASWFRQAPGKEREFVAAISPSGNTYYADSVKGRFTISRD
NGKHTMYLQMNSLNPEDTAVYFCAIRATDSIYYASSYRHWGQGTQVTVSSGGGGSGGGSEVQLVESGGGLMQ
TGGSLRLSCAASGVTYSYYTASWFRQAPGKEREFVAAISPSGNTYYADSVKGRFTISRDNGKHTMYLQMNSL
NPEDTAVYFCAIRATDSIYYASSYRHWGQGTQVTVSS
>RANKL6-9GS-RANKL9, SEQ ID NO: 630; PRT; ->
EVQLVESGGGLMQTGGSLRLSCAASGVTYSYYTASWFRQAPGKEREFVAAISPSGNTYYADSVKGRFTISRD
NGKHTMYLQMNSLNPEDTAVYFCAIRATDSIYYASSYRHWGQGTQVTVSSGGGGSGGGSEVQLVESGGGLVQ
AGGSLRLTCAASGRTFRSYAMGWFRQAPGKEREFVAAINYSGGGTNYADSVKGRFTISRDNAKNTLYLQMNS
LEPEDTAVYYCAAGSGYASLSYYSTERAYTYWGQGTQVTVSS
>RANKL6-9GS-RANKL13, SEQ ID NO: 631; PRT; ->
EVQLVESGGGLMQTGGSLRLSCAASGVTYSYYTASWFRQAPGKEREFVAAISPSGNTYYADSVKGRFTISRD
NGKHTMYLQMNSLNPEDTAVYFCAIRATDSIYYASSYRHWGQGTQVTVSSGGGGSGGGSEVQLVESGGGLVQ
AGGSLRLSCAASGRTFRSYPMGWFRQAPGKEREFVASITGSGGSTYYADSVKGRFTISRDNAKNTVYLQMNS
LRPEDTAVYSCAAYIRPDTYLSRDYRKYDYWGQGTQVTVSS
>RANKL6-9GS-RANKL15, SEQ ID NO: 632; PRT; ->
EVQLVESGGGLMQTGGSLRLSCAASGVTYSYYTASWFRQAPGKEREFVAAISPSGNTYYADSVKGRFTISRD
NGKHTMYLQMNSLNPEDTAVYFCAIRATDSIYYASSYRHWGQGTQVTVSSGGGGSGGGSEVQLVESGGGLVQ
AGGSLRLSCAAAGGTFRNYVMGWFRQAPGKEREFVTAISTGGSWTGYVDSVKDRFTISRDNTKNTVYLQMAS
LKPEDTAVYYCAATTPATTYLPRSERQYDYWGQGTQVTVSS
>RANKL6-9GS-RANKL18, SEQ ID NO: 633; PRT; ->
EVQLVESGGGLMQTGGSLRLSCAASGVTYSYYTASWFRQAPGKEREFVAAISPSGNTYYADSVKGRFTISRD
NGKHTMYLQMNSLNPEDTAVYFCAIRATDSIYYASSYRHWGQGTQVTVSSGGGGSGGGSEVQLVESGGGLVQ
AGGSLRLSCAASGRTFSRSAMGWFRQAPGKEREFVGFITGSGGTTYYGESVKGRFTISRDNAQNPVYLQMNS
LKPEDTAVYYCGVYRRTYISSTYSESSEYDYWGQGTQVTVSS
>RANKL9-9GS-RANKL3, SEQ ID NO: 634; PRT; ->
EVQLVESGGGLVQAGGSLRLTCAASGRTFRSYAMGWFRQAPGKEREFVAAINYSGGSTNYADSVKGRFTISR
DNAKNTLYLQMNSLEPEDTAVYYCAAGSGYASLSYYSTERAYTYWGQGTQVTVSSGGGGSGGGS
EVQLVESGGKLVQAGGSLRLSCAVSGRTSSIYNMAWFRQGPGKSRESVGRIYWSDDNTYYADSVKGRFTISR
DNATNTVYLQMNSLKPEDTAVYYCAGKTTKWSLEYDYWGQGTQVTVSS
>RANKL9-9GS-RANKL6, SEQ ID NO: 635; PRT; ->
EVQLVESGGGLVQAGGSLRLTCAASGRTFRSYAMGWFRQAPGKEREFVAAINYSGGSTNYADSVKGRFTISR
DNAKNTLYLQMNSLEPEDTAVYYCAAGSGYASLSYYSTERAYTYWGQGTQVTVSSGGGGSGGGSEVQLVESG
GGLMQTGGSLRLSCAASGVTYSYYTASWFRQAPGKEREFVAAISPSGNTYYADSVKGRFTISRDNGKHTMYL
QMNSLNPEDTAVYFCAIRATDSIYYASSYRHWGQGTQVTVSS
>RANKL91biv | RANKL9-9GS-RANKL9, SEQ ID NO: 636; PRT; ->
EVQLVESGGGLVQAGGSLRLTCAASGRTFRSYAMGWFRQAPGKEREFVAAINYSGGSTNYADSVKGRFTISR
DNAKNTLYLQMNSLEPEDTAVYYCAAGSGYASLSYYSTERAYTYWGQGTQVTVSSGGGGSGGGSEVQLVESG
GGLVQAGGSLRLTCAASGRTFRSYAMGWFRQAPGKEREFVAAINYSGGSTNYADSVKGRFTISRDNAKNTLY
LQMNSLEPEDTAVYYCAAGSGYASLSYYSTERAYTYWGQGTQVTVSS
>RANKL9-9GS-RANKL13, SEQ ID NO: 637; PRT; ->
EVQLVESGGGLVQAGGSLRLTCAASGRTFRSYAMGWFRQAPGKEREFVAAINYSGGSTNYADSVKGRFTISR
DNAKNTLYLQMNSLEPEDTAVYYCAAGSGYASLSYYSTERAYTYWGQGTQVTVSSGGGGSGGGSEVQLVESG
GGLVQAGGSLRLSCAASGRTFRSYPMGWFRQAPGKEREFVASITGSGGSTYYADSVKGRFTISRDNAKNTVY
LQMNSLRPEDTAVYSCAAYIRPDTYLSRDYRKYDYWGQGTQVTVSS
>RANKL9-9GS-RANKL15, SEQ ID NO: 638; PRT; ->
EVQLVESGGGLVQAGGSLRLTCAASGRTFRSYAMGWFRQAPGKEREFVAAINYSGGSTNYADSVKGRFTISR
DNAKNTLYLQMNSLEPEDTAVYYCAAGSGYASLSYYSTERAYTYWGQGTQVTVSSGGGGSGGGSEVQLVESG
GGLVQAGGSLRLSCAAAGGTFRNYVMGWFRQAPGKEREFVTAISTGGSWTGYVDSVKDRFTISRDNTKNTVY
LQMASLKPEDTAVYYCAATTPATTYLPRSERQYDYWGQGTQVTVSS
>RANKL9-9GS-RANKL18, SEQ ID NO: 639; PRT; ->
EVQLVESGGGLVQAGGSLRLTCAASGRTFRSYAMGWFRQAPGKEREFVAAINYSGGSTNYADSVKGRFTISR
DNAKNTLYLQMNSLEPEDTAVYYCAAGSGYASLSYYSTERAYTYWGQGTQVTVSSGGGGSGGGSEVQLVESG
GGLVQAGGSLRLSCAASGRTFSRSAMGWFRQAPGKEREFVSFITGSGGTTYYGESVKGRFTISRDNAQNPVY
LQMNSLKPEDTAVYYCGVYRRTYISSTYSESSEYDYWGQGTQVTVSS
>RANKL13-9GS-RANKL3, SEQ ID NO: 640; PRT; ->
EVQLVESGGGLVQAGGSLRLSCAASGRTFRSYPMGWFRQAPGKEREFVASITGSGGSTYYADSVKGRFTISR
DNAKNTVYLQMNSLRPEDTAVYSCAAYIRPDTYLSRDYRKYDYWGQGTQVTVSSGGGGSGGGSEVQLVESGG
KLVQAGGSLRLSCAVSGRTSSIYNMAWFRQGPGKGRESVGRIYWSDDNTYYADSVKGRFTISRDNATNTVYL
QMNSLKPEDTAVYYCAGKTTKWSLEYDYWGQGTQVTVSS
>RANKL13-9GS-RANKL6, SEQ ID NO: 641; PRT; ->
EVQLVESGGGLVQAGGSLRLSCAASGRTFRSYPMGWFRQAPGKEREFVASITGSGGSTYYADSVKGRFTISR
DNAKNTVYLQMNSLRPEDTAVYSCAAYIRPDTYLSRDYRKYDYWGQGTQVTVSSGGGGSGGGSEVQLVESGG
GLMQTGGSLRLSCAASGVTYSYYTASWFRQAPGKEREFVAAISPSGNTYYADSVKGRFTISRDNGKHTMYLQ
MNSLNPEDTAVYFCAIRATDSIYYASSYRHWGQGTQVTVSS
>RANKL13-9GS-RANKL9, SEQ ID NO: 642; PRT; ->
EVQLVESGGGLVQAGGSLRLSCAASGRTFRSYPMGWFRQAPGKEREFVASITGSGGSTYYADSVKGRFTISR
DNAKNTVYLQMNSLRPEDTAVYSCAAYIRPDTYLSRDYRKYDYWGQGTQVTVSSGGGGSGGGSEVQLVESGG
GLVQAGGSLRLTCAASGRTFRSYAMGWFRQAPGKEREFVAAINYSGGSTNYADSVKGRFTISRDNAKNTLYL
QMNSLEPEDTAVYYCAAGSGYASLSYYSTERAYTYWGQGTQVTVSS
>RANKL131 | RANKL13-9GS-RANKL13, SEQ ID NO: 643; PRT; ->
EVQLVESGGGLVQAGGSLRLSCAASGRTFRSYPMGWFRQAPGKEREFVASITGSGGSTYYADSVKGRFTISR
DNAKNTVYLQMNSLRPEDTAVYSCAAYIRPDTYLSRDYRKYDYWGQGTQVTVSSGGGGSGGGSEVQLVESGG
GLVQAGGSLRLSCAASGRTFRSYPMGWFRQAPGKEREFVASITGSGGSTYYADSVKGRFTISRDNAKNTVYL
QMNSLRPEDTAVYSCAAYIRPDTYLSRDYRKYDYWGQGTQVTVSS
>RANKL13-9GS-RANKL15, SEQ ID NO: 644; PRT; ->
EVQLVESGGGLVQAGGSLRLSCAASGRTFRSYPMGWFRQAPGKEREFVASITGSGGSTYYADSVKGRFTISR
DNAKNTVYLQMNSLRPEDTAVYSCAAYIRPDTYLSRDYRKYDYWGQGTQVTVSSGGGGSGGGSEVQLVESGG
GLVQAGGSLRLSCAAAGGTFRNYVMGWFRQAPGKEREFVTAISTGGSWTGYVDSVKDRFTISRDNTKNTVYL
QMASLKPEDTAVYYCAATTPATTYLPRSERQYDYWGQGTQVTVSS
>RANKL13-9GS-RANKL18, SEQ ID NO: 645; PRT; ->
EVQLVESGGGLVQAGGSLRLSCAASGRTFRSYPMGWFRQAPGKEREFVASITGSGGSTYYADSVKGRFTISR
DNAKNTVYLQMNSLRPEDTAVYSCAAYIRPDTYLSRDYRKYDYWGQGTQVTVSSGGGGSGGGSEVQLVESGG
GLVQAGGSLRLSCAASGRTFSRSAMGWFRQAPGKEREFVGFITGSGGTTYYGESVKGRFTISRDNAQNPVYL
QMNSLKPEDTAVYYCGVYRRTYISSTYSESSEYDYWGQGTQVTVSS
>RANKL15-9GS-RANKL3, SEQ ID NO: 646; PRT; ->
EVQLVESGGGLVQAGGSLRLSCAAAGGTFRNYVMGWFRQAPGKEREFVTAISTGGSWTGYVDSVKDRFTISR
DNTKNTVYLQMASLKPEDTAVYYCAATTPATTYLPRSERQYDYWGQGTQVTVSSGGGGSGGGSEVQLVESGG
KLVQAGGSLRLSCAVSGRTSSIYNMAWFRQGPGKGRESVGRIYWSDDNTYYADSVKGRFTISRDNATNTVYL
QMNSLKPEDTAVYYCAGKTTKWSLEYDYWGQGTQVTVSS
>RANKL15-9GS-RANKL6, SEQ ID NO: 647; PRT; ->
EVQLVESGGGLVQAGGSLRLSCAAAGGTFRNYVMGWFRQAPGKEREFVTAISTGGSWTSYVDSVKDRFTISR
DNTKNTVYLQMASLKPEDTAVYYCAATTPATTYLPRSERQYDYWGQGTQVTVSSGGGGSGGGSEVQLVESGG
SLMQTGGSLRLSCAASGVTYSYYTASWFRQAPGKEREFVAAISPSGNTYYADSVKGRFTISRDNGKHTMYLQ
MNSLNPEDTAVYFCAIRATDSIYYASSYRHWGQGTQVTVSS
>RANKL15-9GS-RANKL9, SEQ ID NO: 648; PRT; ->
EVQLVESGGGLVQAGGSLRLSCAAAGGTFRNYVMGWFRQAPGKEREFVTAISTGGSWTGYVDSVKDRFTISR
DNTKNTVYLQMASLKPEDTAVYYCAATTPATTYLPRSERQYDYWGQGTQVTVSSGGGGSGGGSEVQLVESGG
GLVQAGGSLRLTCAASGRTFRSYAMGWFRQAPGKEREFVAAINYSGGSTNYADSVKGRFTISRDNAKNTLYL
QMNSLEPEDTAVYYCAAGSGYASLSYYSTERAYTYWGQGTQVTVSS
>RANKL15-9GS-RANKL13, SEQ ID NO: 649; PRT; ->
EVQLVESGGGLVQAGGSLRLSCAAAGGTFRNYVMGWFRQAPGKEREFVTAISTGGSWTGYVDSVKDRFTISR
DNTKNTVYLQMASLKPEDTAVYYCAATTPATTYLPRSERQYDYWGQGTQVTVSSGGGGSGGGSEVQLVESGG
GLVQAGGSLRLSCAASGRTFRSYPMGWFRQAPGKEREFVASITGSGGSTYYADSVKGRFTISRDNAKNTVYL
QMNSLRPEDTAVYSCAAYIRPDTYLSRDYRKYDYWGQGTQVTVSS
>RANKL15-9GS-RANKL15, SEQ ID NO: 650; PRT; ->
EVQLVESGGGLVQAGGSLRLSCAAAGGTFRNYVMGWFRQAPGKEREFVTAISTGGSWTGYVDSVKDRFTISR
DNTKNTVYLQMASLKPEDTAVYYCAATTPATTYLPRSERQYDYWGQGTQVTVSSGGGGSGGGSEVQLVESGG
GLVQAGGSLRLSCAAAGGTFRNYVMGWFRQAPGKEREFVTAISTGGSWTGYVDSVKDRFTISRDNTKNTVYL
QMASLKPEDTAVYYCAATTPATTYLPRSERQYDYWGQGTQVTVSS
>RANKL15-9GS-RANKL18, SEQ ID NO: 651; PRT; ->
EVQLVESGGGLVQAGGSLRLSCAAAGGTFRNYVMGWFRQAPGKEREFVTAISTGGSWTGYVDSVKDRFTISR
DNTKNTVYLQMASLKPEDTAVYYCAATTPATTYLPRSERQYDYWGQGTQVTVSSGGGGSGGGSEVQLVESGG
GLVQAGGSLRLSCAASGRTFSRSAMGWFRQAPGKEREFVGFITGSGGTTYYGESVKGRFTISRDNAQNPVYL
QMNSLKPEDTAVYYCGVYRRTYISSTYSESSEYDYWGQGTQVTVSS
>RANKL18-9GS-RANKL3, SEQ ID NO: 652; PRT; ->
EVQLVESGGGLVQAGGSLRLSCAASGRTFSRSAMGWFRQAPGKEREFVGFITGSGGTTYYGESVKGRFTISR
DNAQNPVYLQMNSLKPEDTAVYYCGVYRRTYISSTYSESSEYDYWGQGTQVTVSSGGGGSGGGSEVQLVESG
GKLVQAGGSLRLSCAVSGRTSSIYNMAWFRQGPGKGRESVGRIYWSDDNTYYADSVKGRFTISRDNATNTVY
LQMNSLKPEDTAVYYCAGKTTKWSLEYDYWGQGTQVTVSS
>RANKL18-9GS-RANKL6, SEQ ID NO: 653; PRT; ->
EVQLVESGGGLVQAGGSLRLSCAASGRTFSRSAMGWFRQAPGKEREFVGFITGSGGTTYYGESVKGRFTISR
DNAQNPVYLQMNSLKPEDTAVYYCGVYRRTYISSTYSESSEYDYWGQGTQVTVSSGGGGSGGGSEVQLVESG
GGLMQTGGSLRLSCAASGVTYSYYTASWFRQAPGKEREFVAAISPSGNTYYADSVKGRFTISRDNGKHTMYL
QMNSLNPEDTAVYFCAIRATDSIYYASSYRHWGQGTQVTVSS
>RANKL18-9GS-RANKL9, SEQ ID NO: 654; PRT; ->
EVQLVESGGGLVQAGGSLRLSCAASGRTFSRSAMGWFRQAPGKEREFVGFITGSGGTTYYGESVKGRFTISR
DNAQNPVYLQMNSLKPEDTAVYYCGVYRRTYISSTYSESSEYDYWGQGTQVTVSSGGGGSGGGSEVQLVESG
GGLVQAGGSLRLTCAASGRTFRSYAMGWFRQAPGKEREFVAAINYSGGSTNYADSVKGRFTISRDNAKNTLY
LQMNSLEPEDTAVYYCAAGSGYASLSYYSTERAYTYWGQGTQVTVSS
>RANKL18-9GS-RANKL13, SEQ ID NO: 655; PRT; ->
EVQLVESGGGLVQAGGSLRLSCAASGRTFSRSAMGWFRQAPGKEREFVGFITGSGGTTYYGESVKGRFTISR
DNAQNPVYLQMNSLKPEDTAVYYCGVYRRTYISSTYSESSEYDYWGQGTQVTVSSGGGGSGGGSEVQLVESG
GGLVQAGGSLRLSCAASGRTFRSYPMGWFRQAPGKEREFVASITGSGGSTYYADSVKGRFTISRDNAKNTVY
LQMNSLRPEDTAVYSCAAYIRPDTYLSRDYRKYDYWGQGTQVTVSS
>RANKL18-9GS-RANKL15, SEQ ID NO: 656; PRT; ->
EVQLVESGGGLVQAGGSLRLSCAASGRTFSRSAMGWFRQAPGKEREFVGFITGSGGTTYYGESVKGRFTISR
DNAQNPVYLQMNSLKPEDTAVYYCGVYRRTYISSTYSESSEYDYWGQGTQVTVSSGGGGSGGGSEVQLVESG
GGLVQAGGSLRLSCAAAGGTFRNYVMGWFRQAPGKEREFVTAISTGGSWTGYVDSVKDRFTISRDNTKNTVY
LQMASLKPEDTAVYYCAATTPATTYLPRSERQYDYWGQGTQVTVSS
>RANKL181 | RANKL18-9GS-RANKL18, SEQ ID NO: 657; PRT; ->
EVQLVESGGGLVQAGGSLRLSCAASGRTFSRSAMGWFRQAPGKEREFVGFITGSGGTTYYGESVKGRFTISR
DNAQNPVYLQMNSLKPEDTAVYYCGVYRRTYISSTYSESSEYDYWGQGTQVTVSSGGGGSGGGSEVQLVESG
GGLVQAGGSLRLSCAASGRTFSRSAMGWFRQAPGKEREFVGFITGSGGTTYYGESVKGRFTISRDNAQNPVY
LQMNSLKPEDTAVYYCGVYRRTYISSTYSESSEYDYWGQGTQVTVSS
>RANKL3-20GS-RANKL3, SEQ ID NO: 658; PRT; ->
EVQLVESGGKLVQAGGSLRLSCAVSGRTSSIYNMAWFRQGPGKGRESVGRIYWSDDNTYYADSVKGRFTISR
DNATNTVYLQMNSLKPEDTAVYYCAGKTTKWSLEYDYWGQGTQVTVSSGGGGSGGGGSGGGGSGGGGSEVQL
VESGGKLVQAGGSLRLSCAVSGRTSSIYNMAWFRQGPGKGRESVGRIYWSDDNTYYADSVKGRFTISRDNAT
NTVYLQMNSLKPEDTAVYYCAGKTTKWSLEYDYWGQGTQVTVSS
>RANKL3-20GS-RANKL6, SEQ ID NO: 659; PRT; ->
EVQLVESGGKLVQAGGSLRLSCAVSGRTSSIYNMAWFRQGPGKGRESVGRIYWSDDNTYYADSVKGRFTISR
DNATNTVYLQMNSLKPEDTAVYYCAGKTTKWSLEYDYWGQGTQVTVSSGGGGSGGGGSGGGGSGGGGSEVQL
VESGGGLMQTGGSLRLSCAASGVTYSYYTASWFRQAPGKEREFVAAISPSGNTYYADSVKGRFTISRDNGKH
TMYLQMNSLNPEDTAVYFCAIRATDSIYYASSYRHWGQGTQVTVSS
>RANKL3-20GS-RANKL9, SEQ ID NO: 660; PRT; ->
EVQLVESGGKLVQAGGSLRLSCAVSGRTSSIYNMAWFRQGPGKGRESVGRIYWSDDNTYYADSVKGRFTISR
DNATNTVYLQMNSLKPEDTAVYYCAGKTTKWSLEYDYWGQGTQVTVSSGGGGSGGGGSGGGGSGGGGS
EVQLVESGGGLVQAGGSLRLTCAASGRTFRSYAMGWFRQAPGKEREFVAAINYSGGSTNYADSVKGRFTISR
DNAKNTLYLQMNSLEPEDTAVYYCAAGSGYASLSYYSTERAYTYWGQGTQVTVSS
>RANKL3-20GS-RANKL13, SEQ ID NO: 661; PRT; ->
EVQLVESGGKLVQAGGSLRLSCAVSGRTSSIYNMAWFRQGPGKGRESVGRIYWSDDNTYYADSVKGRFTISR
DNATNTVYLQMNSLKPEDTAVYYCAGKTTKWSLEYDYWGQGTQVTVSSGGGGSGGGGSGGGGSGGGGSEVQL
VESGGGLVQAGGSLRLSCAASGRTFRSYPMGWFRQAPGKEREFVASITGSGGSTYYADSVKGRFTISRDNAK
NTVYLQMNSLRPEDTAVYSCAAYIRPDTYLSRDYRKYDYWGQGTQVTVSS
>RANKL3-20GS-ANKL15, SEQ ID NO: 662; PRT; ->
EVQLVESGGKLVQAGGSLRLSCAVSGRTSSIYNMAWFRQGPGKGRESVGRIYWSDDNTYYADSVKGRFTISR
DNATNTVYLQMNSLKPEDTAVYYCAGKTTKWSLEYDYWGQGTQVTVSSGGGGSGGGGSGGGGSGGGGSEVQL
VESGGGLVQAGGSLRLSCAAAGGTFRNYVMGWFRQAPGKEREFVTAISTGGSWTGYVDSVKDRFTISRDNTK
NTVYLQMASLKPEDTAVYYCAATTPATTYLPRSERQYDYWGQGTQVTVSS
>RANKL3-20GS-RANKL18, SEQ ID NO: 663; PRT; ->
EVQLVESGGKLVQAGGSLRLSCAVSGRTSSIYNMAWFRQGPGKGRESVGRIYWSDDNTYYADSVKGRFTISR
DNATNTVYLQMNSLKPEDTAVYYCAGKTTKWSLEYDYWGQGTQVTVSSGGGGSGGGGSGGGGSGGGGSEVQL
VESGGGLVQAGGSLRLSCAASGRTFSRSAMGWFRQAPGKEREFVGFITGSGGTTYYGESVKGRFTISRDNAQ
NPVYLQMNSLKPEDTAVYYCGVYRRTYISSTYSESSEYDYWGQGTQVTVSS
>RANKL6-20GS-RANKL3, SEQ ID NO: 664; PRT; ->
EVQLVESGGGLMQTGGSLRLSCAASGVTYSYYTASWFRQAPGKEREFVAAISPSGNTYYADSVKGRFTISRD
NGKHTMYLQMNSLNPEDTAVYFCAIRATDSIYYASSYRHWGQGTQVTVSSGGGGSGGGGSGGGGSGGGGSEV
QLVESGGKLVQAGGSLRLSCAVSGRTSSIYNMAWFRQGPGKGRESVGRIYWSDDNTYYADSVKGRFTISRDN
ATNTVYLQMNSLKPEDTAVYYCAGKTTKWSLEYDYWGQGTQVTVSS
>RANKL6-20GS-RANKL6, SEQ ID NO: 665; PRT; ->
EVQLVESGGGLMQTGGSLRLSCAASGVTYSYYTASWFRQAPGKEREFVAAISPSGNTYYADSVKGRFTISRD
NGKHTMYLQMNSLNPEDTAVYFCAIRATDSIYYASSYRHWGQGTQVTVSSGGGGSGGGGSGGGGSGGGGSEV
QLVESGGGLMQTGGSLRLSCAASGVTYSYYTASWFRQAPGKEREFVAAISPSGNTYYADSVKGRFTISRDNG
KHTMYLQMNSLNPEDTAVYFCAIRATDSIYYASSYRHWGQGTQVTVSS
>RANKL6-20GS-RANKL9, SEQ ID NO: 666; PRT; ->
EVQLVESGGGLMQTGGSLRLSCAASGVTYSYYTASWFRQAPGKEREFVAAISPSGNTYYADSVKGRFTISRD
NGKHTMYLQMNSLNPEDTAVYFCAIRATDSIYYASSYRHWGQGTQVTVSSGGGGSGGGGSGGGGSGGGGSEV
QLVESGGGLVQAGGSLRLTCAASGRTFRSYAMGWFRQAPGKEREFVAAINYSGGSTNYADSVKGRFTISRDN
AKNTLYLQMNSLEPEDTAVYYCAAGSGYASLSYYSTERAYTYWGQGTQVTVSS
>RANKL6-20GS-RANKL13, SEQ ID NO: 667; PRT; ->
EVQLVESGGGLMQTGGSLRLSCAASGVTYSYYTASWFRQAPGKEREFVAAISPSGNTYYADSVKGRFTISRD
NGKHTMYLQMNSLNPEDTAVYFCAIRATDSIYYASSYRHWGQGTQVTVSSGGGGSGGGGSGGGGSGGGGSEV
QLVESGGGLVQAGGSLRLSCAASGRTFRSYPMGWFRQAPGKEREFVASITGSGGSTYYADSVKGRFTISRDN
AKNTVYLQMNSLRPEDTAVYSCAAYIRPDTYLSRDYRKYDYWGQGTQVTVSS
>RANKL6-20GS-RANKL15, SEQ ID NO: 668; PRT; ->
EVQLVESGGGLMQTGGSLRLSCAASGVTYSYYTASWFRQAPGKEREFVAAISPSGNTYYADSVKGRFTISRD
NGKHTMYLQMNSLNPEDTAVYFCAIRATDSIYYASSYRHWGQGTQVTVSSGGGGSGGGGSGGGGSGGGGSEV
QLVESGGGLVQAGGSLRLSCAAAGGTFRNYVMGWFRQAPGKEREFVTAISTGGSWTGYVDSVKDRFTISRDN
TKNTVYLQMASLKPEDTAVYYCAATTPATTYLPRSERQYDYWGQGTQVTVSS
>RANKL6-20GS-RANKL18, SEQ ID NO: 669; PRT; ->
EVQLVESGGGLMQTGGSLRLSCAASGVTYSYYTASWFRQAPGKEREFVAAISPSGNTYYADSVKGRFTISRD
NGKHTMYLQMNSLNPEDTAVYFCAIRATDSIYYASSYRHWGQGTQVTVSSGGGGSGGGGSGGGGSGGGGS
EVQLVESGGGLVQAGGSLRLSCAASGRTFSRSAMGWFRQAPGKEREFVGFITGSGGTTYYGESVKGRFTISR
DNAQNPVYLQMNSLKPEDTAVYYCGVYRRTYISSTYSESSEYDYWGQGTQVTVSS
>RANKL9-20GS-RANKL3, SEQ ID NO: 670; PRT; ->
EVQLVESGGGLVQAGGSLRLTCAASGRTFRSYAMGWFRQAPGKEREFVAAINYSGGSTNYADSVKGRFTISR
DNAKNTLYLQMNSLEPEDTAVYYCAAGSGYASLSYYSTERAYTYWGQGTQVTVSSGGGGSGGGGSGGGGSGG
GGSEVQLVESGGKLVQAGGSLRLSCAVSGRTSSIYNMAWFRQGPGKGRESVGRIYWSDDNTYYADSVKGRFT
ISRDNATNTVYLQMNSLKPEDTAVYYCAGKTTKWSLEYDYWGQGTQVTVSS
>RANKL9-20GS-RANKL6, SEQ ID NO: 671; PRT; ->
EVQLVESGGGLVQAGGSLRLTCAASGRTFRSYAMGWFRQAPGKEREFVAAINYSGGSTNYADSVKGRFTISR
DNAKNTLYLQMNSLEPEDTAVYYCAAGSGYASLSYYSTERAYTYWGQGTQVTVSSGGGGSGGGGSGGGGSGG
GGSEVQLVESGGGLMQTGGSLRLSCAASGVTYSYYTASWFRQAPGKEREFVAAISPSGNTYYADSVKGRFTI
SRDNGKHTMYLQMNSLNPEDTAVYFCAIRATDSIYYASSYRHWGQGTQVTVSS
>RANKL9-2biv | RANKL9-20GS-RANKL9, SEQ ID NO: 672; PRT; ->
EVQLVESGGGLVQAGGSLRLTCAASGRTFRSYAMGWFRQAPGKEREFVAAINYSGGSTNYADSVKGRFTISR
DNAKNTLYLQMNSLEPEDTAVYYCAAGSGYASLSYYSTERAYTYWGQGTQVTVSSGGGGSGGGGSGGGGSGG
GGSEVQLVESGGGLVQAGGSLRLTCAASGRTFRSYAMGWFRQAPGKEREFVAAINYSGGSTNYADSVKGRFT
ISRDNAKNTLYLQMNSLEPEDTAVYYCAAGSGYASLSYYSTERAYTYWGQGTQVTVSS
>RANKL9-20GS-RANKL13, SEQ ID NO: 673; PRT; ->
EVQLVESGGGLVQAGGSLRLTCAASGRTFRSYAMGWFRQAPGKEREFVAAINYSGGSTNYADSVKGRFTISR
DNAKNTLYLQMNSLEPEDTAVYYCAAGSGYASLSYYSTERAYTYWGQGTQVTVSSGGGGSGGGGSGGGGSGG
GGSEVQLVESGGGLVQAGGSLRLSCAASGRTFRSYPMGWFRQAPGKEREFVASITGSGGSTYYADSVKGRFT
ISRDNAKNTVYLQMNSLRPEDTAVYSCAAYIRPDTYLSRDYRKYDYWGQGTQVTVSS
>RANKL9-20GS-RANKL15, SEQ ID NO: 674; PRT; ->
EVQLVESGGGLVQAGGSLRLTCAASGRTFRSYAMGWFRQAPGKEREFVAAINYSGGSTNYADSVKGRFTISR
DNAKNTLYLQMNSLEPEDTAVYYCAAGSGYASLSYYSTERAYTYWGQGTQVTVSSGGGGSGGGGSGGGGSGG
GGSEVQLVESGGGLVQAGGSLRLSCAAAGGTFRNYVMGWFRQAPGKEREFVTAISTGGSWTGYVDSVKDRFT
ISRDNTKNTVYLQMASLKPEDTAVYYCAATTPATTYLPRSERQYDYWGQGTQVTVSS
>RANKL9-20GS-RANKL18, SEQ ID NO: 675; PRT; ->
EVQLVESGGGLVQAGGSLRLTCAASGRTFRSYAMGWFRQAPGKEREFVAAINYSGGSTNYADSVKGRFTISR
DNAKNTLYLQMNSLEPEDTAVYYCAAGSGYASLSYYSTERAYTYWGQGTQVTVSSGGGGSGGGGSGGGGSGG
GGSEVQLVESGGGLVQAGGSLRLSCAASGRTFSRSAMGWFRQAPGKEREFVGFITGSGGTTYYGESVKGRFT
ISRDNAQNPVYLQMNSLKPEDTAVYYCGVYRRTYISSTYSESSEYDYWGQGTQVTVSS
>RANKL13-20GS-RANKL3, SEQ ID NO: 676; PRT; ->
EVQLVESGGGLVQAGGSLRLSCAASGRTFRSYPMGWFRQAPGKEREFVASITGSGGSTYYADSVKGRFTISR
DNAKNTVYLQMNSLRPEDTAVYSCAAYIRPDTYLSRDYRKYDYWGQGTQVTVSSGGGGSGGGGSGGGGSGGG
GSEVQLVESGGKLVQAGGSLRLSCAVSGRTSSIYNMAWFRQGPGKGRESVGRIYWSDDNTYYADSVKGRFTI
SRDNATNTVYLQMNSLKPEDTAVYYCAGKTTKWSLEYDYWGQGTQVTVSS
>RANKL13-20GS-RANKL6, SEQ ID NO: 677; PRT; ->
EVQLVESGGGLVQAGGSLRLSCAASGRTFRSYPMGWFRQAPGKEREFVASITGSGGSTYYADSVKGRFTISR
DNAKNTVYLQMNSLRPEDTAVYSCAAYIRPDTYLSRDYRKYDYWGQGTQVTVSSGGGGSGGGGSGGGGSGGG
GSEVQLVESGGGLMQTGGSLRLSCAASGVTYSYYTASWFRQAPGKEREFVAAISPSGNTYYADSVKGRFTIS
RDNGKHTMYLQMNSLNPEDTAVYFCAIRATDSIYYASSYRHWGQGTQVTVSS
>RANKL13-20GS-RANKL9, SEQ ID NO: 678; PRT; ->
EVQLVESGGGLVQAGGSLRLSCAASGRTFRSYPMGWFRQAPGKEREFVASITGSGGSTYYADSVKGRFTISR
DNAKNTVYLQMNSLRPEDTAVYSCAAYIRPDTYLSRDYRKYDYWGQGTQVTVSSGGGGSGGGGSGGGGSGGG
GSEVQLVESGGGLVQAGGSLRLTCAASGRTFRSYAMGWFRQAPGKEREFVAAINYSGGSTNYADSVKGRFTI
SRDNAKNTLYLQMNSLEPEDTAVYYCAAGSGYASLSYYSTERAYTYWGQGTQVTVSS
>RANKL13-20GS-RANKL13, SEQ ID NO: 679; PRT; ->
EVQLVESGGGLVQAGGSLRLSCAASGRTFRSYPMGWFRQAPGKEREFVASITGSGGSTYYADSVKGRFTISR
DNAKNTVYLQMNSLRPEDTAVYSCAAYIRPDTYLSRDYRKYDYWGQGTQVTVSSGGGGSGGGGSGGGGSGGG
GSEVQLVESGGGLVQAGGSLRLSCAASGRTFRSYPMGWFRQAPGKEREFVASITGSGGSTYYADSVKGRFTI
SRDNAKNTVYLQMNSLRPEDTAVYSCAAYIRPDTYLSRDYRKYDYWGQGTQVTVSS
>RANKL13-20GS-RANKL15, SEQ ID NO: 680; PRT; ->
EVQLVESGGGLVQAGGSLRLSCAASGRTFRSYPMGWFRQAPGKEREFVASITGSGGSTYYADSVKGRFTISR
DNAKNTVYLQMNSLRPEDTAVYSCAAYIRPDTYLSRDYRKYDYWGQGTQVTVSSGGGGSGGGGSGGGGSGGG
GSEVQLVESGGGLVQAGGSLRLSCAAAGGTFRNYVMGWFRQAPGKEREFVTAISTGGSWTGYVDSVKDRFTI
SRDNTKNTVYLQMASLKPEDTAVYYCAATTPATTYLPRSERQYDYWGQGTQVTVSS
>RANKL13-20GS-RANKL18, SEQ ID NO: 681; PRT; ->
EVQLVESGGGLVQAGGSLRLSCAASGRTFRSYPMGWFRQAPGKEREFVASITGSGGSTYYADSVKGRFTISR
DNAKNTVYLQMNSLRPEDTAVYSCAAYIRPDTYLSRDYRKYDYWGQGTQVTVSSGGGGSGGGGSGGGGSGGG
GSEVQLVESGGGLVQAGGSLRLSCAASGRTFSRSAMGWFRQAPGKEREFVGFITGSGGTTYYGESVKGRFTI
SRDNAQNPVYLQMNSLKPEDTAVYYCGVYRRTYISSTYSESSEYDYWGQGTQVTVSS
>RANKL15-20GS-RANKL3, SEQ ID NO: 682; PRT; ->
EVQLVESGGGLVQAGGSLRLSCAAAGGTFRNYVMGWFRQAPGKEREFVTAISTGGSWTGYVDSVKDRFTISR
DNTKNTVYLQMASLKPEDTAVYYCAATTPATTYLPRSERQYDYWGQGTQVTVSSGGGGSGGGGSGGGGSGGG
GSEVQLVESGGKLVQAGGSLRLSCAVSGRTSSIYNMAWFRQGPGKGRESVGRIYWSDDNTYYADSVKGRFTI
SRDNATNTVYLQMNSLKPEDTAVYYCAGKTTKWSLEYDYWGQGTQVTVSS
>RANKL15-20GS-RANKL6, SEQ ID NO: 683; PRT; ->
EVQLVESGGGLVQAGGSLRLSCAAAGGTFRNYVMGWFRQAPGKEREFVTAISTGGSWTGYVDSVKDRFTISR
DNTKNTVYLQMASLKPEDTAVYYCAATTPATTYLPRSERQYDYWGQGTQVTVSSGGGGSGGGGSGGGGSGGG
GSEVQLVESGGGLMQTGGSLRLSCAASGVTYSYYTASWFRQAPGKEREFVAAISPSGNTYYADSVKGRFTIS
RDNGKHTMYLQMNSLNPEDTAVYFCAIRATDSIYYASSYRHWGQGTQVTVSS
>RANKL15-20GS-RANKL9, SEQ ID NO: 684; PRT; ->
EVQLVESGGGLVQAGGSLRLSCAAAGGTFRNYVMGWFRQAPGKEREFVTAISTGGSWTGYVDSVKDRFTISR
DNTKNTVYLQMASLKPEDTAVYYCAATTPATTYLPRSERQYDYWGQGTQVTVSSGGGGSGGGGSGGGGSGGG
GSEVQLVESGGGLVQAGGSLRLTCAASGRTFRSYAMGWFRQAPGKEREFVAAINYSGGSTNYADSVKGRFTI
SRDNAKNTLYLQMNSLEPEDTAVYYCAAGSGYASLSYYSTERAYTYWGQGTQVTVSS
>RANKL15-20GS-RANKL13, SEQ ID NO: 685; PRT; ->
EVQLVESGGGLVQAGGSLRLSCAAAGGTFRNYVMGWFRQAPGKEREFVTAISTGGSWTGYVDSVKDRFTISR
DNTKNTVYLQMASLKPEDTAVYYCAATTPATTYLPRSERQYDYWGQGTQVTVSSGGGGSGGGGSGGGGSGGG
GSEVQLVESGGGLVQAGGSLRLSCAASGRTFRSYPMGWFRQAPGKEREFVASITGSGGSTYYADSVKGRFTI
SRDNAKNTVYLQMNSLRPEDTAVYSCAAYIRPDTYLSRDYRKYDYWGQGTQVTVSS
>RANKL15-20GS-RANKL15, SEQ ID NO: 686; PRT; ->
EVQLVESGGGLVQAGGSLRLSCAAAGGTFRNYVMGWFRQAPGKEREFVTAISTGGSWTGYVDSVKDRFTISR
DNTKNTVYLQMASLKPEDTAVYYCAATTPATTYLPRSERQYDYWGQGTQVTVSSGGGGSGGGGSGGGGSGGG
GSEVQLVESGGGLVQAGGSLRLSCAAAGGTFRNYVMGWFRQAPGKEREFVTAISTGGSWTGYVDSVKDRFTI
SRDNTKNTVYLQMASLKPEDTAVYYCAATTPATTYLPRSERQYDYWGQGTQVTVSS
>RANKL15-20GS-RANKL18, SEQ ID NO: 687; PRT; ->
EVQLVESGGGLVQAGGSLRLSCAAAGGTFRNYVMGWFRQAPGKEREFVTAISTGGSWTGYVDSVKDRFTISR
DNTKNTVYLQMASLKPEDTAVYYCAATTPATTYLPRSERQYDYWGQGTQVTVSSGGGGSGGGGSGGGGSGGG
GSEVQLVESGGGLVQAGGSLRLSCAASGRTFSRSAMGWFRQAPGKEREFVGFITGSGGTTYYGESVKGRFTI
SRDNAQNPVYLQMNSLKPEDTAVYYCGVYRRTYISSTYSESSEYDYWGQGTQVTVSS
>RANKL18-20GS-RANKL3, SEQ ID NO: 688; PRT; ->
EVQLVESSSSLVQAGGSLRLSCAASGRTFSRSAMGWFRQAPGKEREFVGFITGSGGTTYYGESVKGRFTISR
DNAQNPVYLQMNSLKPEDTAVYYCGVYRRTYISSTYSESSEYDYWGQGTQVTVSSGGGGSGGGGSGGGGSGG
GGSEVQLVESGGKLVQAGGSLRLSCAVSGRTSSIYNMAWFRQGPGKGRESVGRIYWSDDNTYYADSVKGRFT
ISRDNATNTVYLQMNSLKPEDTAVYYCAGKTTKWSLEYDYWGQGTQVTVSS
>RANKL18-20GS-RANKL6, SEQ ID NO: 689; PRT; ->
EVQLVESGGGLVQAGGSLRLSCAASGRTFSRSAMGWFRQAPGKEREFVGFITGSGGTTYYGESVKHRFTISR
DNAQNPVYLQMNSLKPEDTAVYYCGVYRRTYISSTYSESSEYDYWGQGTQVTVSSGGGGSGGGGSGGGGSGG
GGSEVQLVESGGGLMQTGGSLRLSCAASGVTYSYYTASWFRQAPGKEREFVAAISPSGNTYYADSVKGRFTI
SRDNGKHTMYLQMNSLNPEDTAVYFCAIRATDSIYYASSYRHWGQGTQVTVSS
>RANKL18-20GS-RANKL9, SEQ ID NO: 690; PRT; ->
EVQLVESGGGLVQAGGSLRLSCAASGRTFSRSAMGWFRQAPGKEREFVGFITGSGGTTYYGESVKGRFTISR
DNAQNPVYLQMNSLKPEDTAVYYCGVYRRTYISSTYSESSEYDYWGQGTQVTVSSGGGGSGGGGSGGGGSGG
GGSEVQLVESGGGLVQAGGSLRLTCAASGRTFRSYAMGWFRQAPGKEREFVAAINYSGGSTNYADSVKGRFT
ISRDNAKNTLYLQMNSLEPEDTAVYYCAAGSGYASLSYYSTERAYTYWGQGTQVTVSS
>RANKL18-20GS-RANKL13, SEQ ID NO: 691; PRT; ->
EVQLVESGGGLVQAGGSLRLSCAASGRTFSRSAMGWFRQAPGKEREFVSFITGSGGTTYYGESVKGRFTISR
DNAQNPVYLQMNSLKPEDTAVYYCGVYRRTYISSTYSESSEYDYWGQGTQVTVSSGGGGSGGGGSGGGGSGG
GGSEVQLVESGGGLVQAGGSLRLSCAASGRTFRSYPMGWFRQAPGKEREFVASITGSGGSTYYADSVKGRFT
ISRDNAKNTVYLQMNSLRPEDTAVYSCAAYIRPDTYLSRDYRKYDYWGQGTQVTVSS
>RANKL18-20GS-RANKL15, SEQ ID NO: 692; PRT; ->
EVQLVESGGGLVQAGGSLRLSCAASGRTFSRSAMGWFRQAPGKEREFVGFITGSGGTTYYGESVKGRFTISR
DNAQNPVYLQMNSLKPEDTAVYYCGVYRRTYISSTYSESSEYDYWGQGTQVTVSSGGGGSGGGGSGGGGSGG
GGSEVQLVESGGGLVQAGGSLRLSCAAAGGTFRNYVMGWFRQAPGKEREFVTAISTGGSWTGYVDSVKDRFT
ISRDNTKNTVYLQMASLKPEDTAVYYCAATTPATTYLPRSERQYDYWGQGTQVTVSS
>RANKL182biv | RANKL18-20GS-RANKL18, SEQ ID NO: 693; PRT; ->
EVQLVESGGGLVQAGGSLRLSCAASGRTFSRSAMGWFRQAPGKEREFVGFITGSGGTTYYGESVKGRFTISR
DNAQNPVYLQMNSLKPEDTAVYYCGVYRRTYISSTYSESSEYDYWGQGTQVTVSSGGGGSGGGGSGGGGSGG
GGSEVQLVESGGGLVQAGGSLRLSCAASGRTFSRSAMGWFRQAPGKEREFVGFITGSGGTTYYGESVKGRFT
ISRDNAQNPVYLQMNSLKPEDTAVYYCGVYRRTYISSTYSESSEYDYWGQGTQVTVSS
RANKL133 | RANKL13-30GS-RANKL13, SEQ ID NO: 766; PRT; ->
EVQLVESGGGLVQAGGSLRLSCAASGRTFRSYPMGWFRQAPGKEREFVASITGSGGSTYYADSVKGRFTISR
DNAKNTVYLQMNSLRPEDTAVYSCAAYIRPDTYLSRDYRKYDYWGQGTQVTVSSGGGGSGGGGSGGGGSGGG
GSGGGGSGGGGSEVQLVESGGGLVQAGGSLRLSCAASGRTFRSYPMGWFRQAPGKEREFVASITGSGGSTYY
ADSVKGRFTISRDNAKNTVYLQMNSLRPEDTAVYSCAAYIRPDTYLSRDYRKYDYWGQGTQVTVS
RANKL183biv | RANKL18-30GS-RANKL18, SEQ ID NO: 767; PRT; ->
EVQLVESGGGLVQAGGSLRLSCAASGRTFSRSAMGWFRQAPGKEREFVGFITGSGGTTYYGESVKGRFTISR
DNAQNPVYLQMNSLKPEDTAVYYCGVYRRTYISSTYSESSEYDYWGQGTQVTVSSGGGGSGGGGSGGGGSGG
GGSGGGGSGGGGSEVQLVESGGGLVQAGGSLRLSCAASGRTFSRSAMGWFRQAPGKEREFVGFITGSGGTTY
YGESVKGRFTISRDNAQNPVYLQMNSLKPEDTAVYYCGVYRRTYISSTYSESSEYDYWGQGTQVTVSS
RANKL93biv | RANKL9-30GS-RANKL9, SEQ ID NO: 770; PRT; ->
EVQLVESGGGLVQAGGSLRLTCAASGRTFRSYAMGWFRQAPGKEREFVAAINYSGGSTNYADSVKGRFTISR
DNAKNTLYLQMNSLEPEDTAVYYCAAGSGYASLSYYSTERAYTYWGQGTQVTVSSGGGGSGGGGSGGGGSGG
GGSGGGGSGGGGSEVQLVESGGGLVQAGGSLRLTCAASGRTFRSYAMGWFRQAPGKEREFVAAINYSGGSTN
YADSVKGRFTISRDNAKNTLYLQMNSLEPEDTAVYYCAAGSGYASLSYYSTERAYTYWGQGTQVTVSS
RANKL94biv | RANKL9-15GS-RANKL9, SEQ ID NO: 771; PRT; ->
EVQLVESGGGLVQAGGSLRLTCAASGRTFRSYAMGWFRQAPGKEREFVAAINYSGGSTNYADSVKGRFTISR
DNAKNTLYLQMNSLEPEDTAVYYCAAGSGYASLSYYSTERAYTYWGQGTQVTVSSGGGGSGGGGSGGGGSEV
QLVESGGGLVQAGGSLRLTCAASGRTFRSYAMGWFRQAPGKEREFVAAINYSGGSTNYADSVKGRFTISRDN
AKNTLYLQMNSLEPEDTAVYYCAAGSGYASLSYYSTERAYTYWGQGTQVTVSS

TABLE B-4

Trivalent bispecific Nanobodies against RANK-L

<Name, SEQ ID #; PRT (protein); ->
Sequence
>RANKL30 | RANKL3-ALB1-RANKL3, SEQ ID NO: 694; PRT; ->
EVQLVESSSKLVQAGGSLRLSCAVSGRTSSIYNMAWFRQGPGKGRESVGRIYWSDDNTYYADSVKGRFTISR
DNATNTVYLQMNSLKPEDTAVYYCAGKTTKWSLEYDYWGQGTQVTVSSGGGGSGGGSEVQLVESGGGLVQPG
NSLRLSCAASGFTFRSFGMSWVRQAPGKEPEWVSSISGSGSDTLYADSVKGRFTISRDNAKTTLYLQMNSLK
PEDTAVYYCTIGGSLSRSSQGTQVTVSSGGGGSGGGSEVQLVESGGKLVQAGGSLRLSCAVSGRTSSIYNMA
WFRQGPGKGRESVGRIYWSDDNTYYADSVKGRFTISRDNATNTVYLQMNSLKPEDTAVYYCAGKTTKWSLEY
DYWGQGTQVTVSS
>RANKL3-ALB1-RANKL6, SEQ ID NO: 695; PRT; ->
EVQLVESGGKLVQAGGSLRLSCAVSGRTSSIYNMAWFRQGPGKGRESVGRIYWSDDNTYYADSVKGRFTISR
DNATNTVYLQMNSLKPEDTAVYYCAGKTTKWSLEYDYWGQGTQVTVSSGGGGSGGGSEVQLVESGGGLVQPG
NSLRLSCAASGFTFRSFGMSWVRQAPGKEPEWVSSISGSGSDTLYADSVKGRFTISRDNAKTTLYLQMNSLK
PEDTAVYYCTIGGSLSRSSQGTQVTVSSGGGGSGGGSEVQLVESGGGLMQTGGSLRLSCAASGVTYSYYTAS
WFRQAPGKEREFVAAISPSGNTYYADSVKGRFTISRDNGKHTMYLQMNSLNPEDTAVYFCAIRATDSIYYAS
SYRHWGQGTQVTVSS
>RANKL3-ALB1-RANKL9, SEQ ID NO: 696; PRT; ->
EVQLVESGGKLVQAGGSLRLSCAVSGRTSSIYNMAWFRQGPGKGRESVGRIYWSDDNTYYADSVKGRFTISR
DNATNTVYLQMNSLKPEDTAVYYCAGKTTKWSLEYDYWGQGTQVTVSSGGGGSGGGSEVQLVESGGGLVQPG
NSLRLSCAASGFTFRSFGMSWVRQAPGKEPEWVSSISGSGSDTLYADSVKGRFTISRDNAKTTLYLQMNSLK
PEDTAVYYCTIGGSLSRSSQGTQVTVSSGGGGSGGGSEVQLVESGGGLVQAGGSLRLTCAASGRTFRSYAMG
WFRQAPGKEREFVAAINYSGGSTNYADSVKGRFTISRDNAKNTLYLQMNSLEPEDTAVYYCAAGSGYASLSY
YSTERAYTYWGQGTQVTVSS
>RANKL3-ALB1-RANKL13, SEQ ID NO: 697; PRT; ->
EVQLVESGGKLVQAGGSLRLSCAVSGRTSSIYNMAWFRQGPGKGRESVGRIYWSDDNTYYADSVKGRFTISR
DNATNTVYLQMNSLKPEDTAVYYCAGKTTKWSLEYDYWGQGTQVTVSSGGGGSGGGSEVQLVESGGGLVQPG
NSLRLSCAASGFTFRSFGMSWVRQAPGKEPEWVSSISGSGSDTLYADSVKGRFTISRDNAKTTLYLQMNSLK
PEDTAVYYCTIGGSLSRSSQGTQVTVSSGGGGSGGGSEVQLVESGGGLVQAGGSLRLSCAASGRTFRSYPMG
WFRQAPGKEREFVASITGSGGSTYYADSVKGRFTISRDNAKNTVYLQMNSLRPEDTAVYSCAAYIRPDTYLS
RDYRKYDYWGQGTQVTVSS
>RANKL3-ALB1-RANKL15, SEQ ID NO: 698; PRT; ->
EVQLVESGGKLVQAGGSLRLSCAVSGRTSSIYNMAWFRQGPGKGRESVGRIYWSDDNTYYADSVKGRFTISR
DNATNTVYLQMNSLKPEDTAVYYCAGKTTKWSLEYDYWGQGTQVTVSSGGGGSGGGSEVQLVESGGGLVQPG
NSLRLSCAASGFTFRSFGMSWVRQAPGKEPEWVSSISGSGSDTLYADSVKGRFTISRDNAKTTLYLQMNSLK
PEDTAVYYCTIGGSLSRSSQGTQVTVSSGGGGSGGGSEVQLVESGGGLVQAGGSLRLSCAAAGGTFRNYVMG
WFRQAPGKEREFVTAISTGGSWTGYVDSVKDRFTISRDNTKNTVYLQMASLKPEDTAVYYCAATTPATTYLP
RSERQYDYWGQGTQVTVSS
>RANKL3-ALB1-RANKL18, SEQ ID NO: 699; PRT; ->
EVQLVESGGKLVQAGGSLRLSCAVSGRTSSIYNMAWFRQGPGKGRESVGRIYWSDDNTYYADSVKGRFTISR
DNATNTVYLQMNSLKPEDTAVYYCAGKTTKWSLEYDYWGQGTQVTVSSGGGGSGGGSEVQLVESGGGLVQPG
NSLRLSCAASGFTFRSFGMSWVRQAPGKEPEWVSSISGSGSDTLYADSVKGRFTISRDNAKTTLYLQMNSLK
PEDTAVYYCTIGGSLSRSSQGTQVTVSSGGGGSGGGSEVQLVESGGGLVQAGGSLRLSCAASGRTFSRSAMG
WFRQAPGKEREFVGFITGSGGTTYYGESVKGRFTISRDNAQNPVYLQMNSLKPEDTAVYYCGVYRRTHISST
YSESSEYDYWGQGTQVTVSS
>RANKL6-ALB1-RANKL3, SEQ ID NO: 700; PRT; ->
EVQLVESGGGLMQTGGSLRLSCAASGVTYSYYTASWFRQAPGKEREFVAAISPSGNTYYADSVKGRFTISRD
NGKHTMYLQMNSLNPEDTAVYFCAIRATDSIYYASSYRHWGQGTQVTVSSGGGGSGGGSEVQLVESGGGLVQ
PGNSLRLSCAASGFTFRSFGMSWVRQAPGKEPEWVSSISGSGSDTLYADSVKGRFTISRDNAKTTLYLQMNS
LKPEDTAVYYCTIGGSLSRSSQGTQVTVSSGGGGSGGGSEVQLVESGGKLVQAGGSLRLSCAVSGRTSSIYN
MAWFRQGPGKGRESVGRIYWSDDNTYYADSVKGRFTISRDNATNTVYLQMNSLKPEDTAVYYCAGKTTKWSL
EYDYWGQGTQVTVSS
>RANKL60 | RANKL6-ALB1-RANKL6, SEQ ID NO: 701; PRT; ->
EVQLVESGGGLMQTGGSLRLSCAASGVTYSYYTASWFRQAPGKEREFVAAISPSGNTYYADSVKGRFTISRD
NGKHTMYLQMNSLNPEDTAVYFCAIRATDSIYYASSYRHWGQGTQVTVSSGGGGSGGGSEVQLVESGGGLVQ
PGNSLRLSCAASGFTFRSFGMSWVRQAPGKEPEWVSSISGSGSDTLYADSVKGRFTISRDNAKTTLYLQMNS
LKPEDTAVYYCTIGGSLSRSSQGTQVTVSSGGGGSGGGSEVQLVESGGGLMQTGGSLRLSCAASGVTYSYYT
ASWFRQAPGKEREFVAAISPSGNTYYADSVKGRFTISRDNGKHTMYLQMNSLNPEDTAVYFCAIRATDSIYY
ASSYRHWGQGTQVTVSS
>RANKL6-ALB1-RANKL9, SEQ ID NO: 702; PRT; ->
EVQLVESGGGLMQTGGSLRLSCAASGVTYSYYTASWFRQAPGKEREFVAAISPSGNTYYADSVKGRFTISRD
NGKHTMYLQMNSLNPEDTAVYFCAIRATDSIYYASSYRHWGQGTQVTVSSGGGGSGGGSEVQLVESGGGLVQ
PGNSLRLSCAASGFTFRSFSGSWVRQAPGKEPEWVSSISGSGSDTLYADSVKGRFTISRDNAKTTLYLQMNS
LKPEDTAVYYCTIGGSLSRSSQGTQVTVSSGGGGSGGGSEVQLVESGGGLVQAGGSLRLTCAASGRTFRSYA
MGWFRQAPGKEREFVAAINYSGGSTNYADSVKGRFTISRDNAKNTLYLQMNSLEPEDTAVYYCAAGSGYASL
SYYSTERAYTYWGQGTQVTVSS
>RANKL6-ALB1-RANKL13, SEQ ID NO: 703; PRT; ->
EVQLVESGGGLMQTGGSLRLSCAASGVTYSYYTASWFRQAPGKEREFVAAISPSGNTYYADSVKGRFTISRD
NGKHTMYLQMNSLNPEDTAVYFCAIRATDSIYYASSYRHWGQGTQVTVSSGGGGSGGGSEVQLVESGGGLVQ
PGNSLRLSCAASGFTFRSFGMSWVRQAPGKEPEWVSSISGSGSDTLYADSVKGRFTISRDNAKTTLYLQMNS
LKPEDTAVYYCTIGGSLSRSSQGTQVTVSSGGGGSGGGSEVQLVESGGGLVQAGGSLRLSCAASGRTFRSYP
MGWFRQAPGKEREFVASITGSGGSTYYADSVKGRFTISRDNAKNTVYLQMNSLRPEDTAVYSCAAYIRPDTY
LSRDYRKYDYWGQGTQVTVSS
>RANKL6-ALB1-RANKL15, SEQ ID NO: 704; PRT; ->
EVQLVESGGGLMQTGGSLRLSCAASGVTYSYYTASWFRQAPGKEREFVAAISPSGNTYYADSVKGRFTISRD
NGKHTMYLQMNSLNPEDTAVYFCAIRATDSIYYASSYRHWGQGTQVTVSSGGGGSGGGSEVQLVESGGGLVQ
PGNSLRLSCAASGFTFRSFGMSWVRQAPGKEPEWVSSISGSGSDTLYADSVKGRFTISRDNAKTTLYLQMNS
LKPEDTAVYYCTIGGSLSRSSQGTQVTVSSGGGGSGGGSEVQLVESGGGLVQAGGSLRLSCAAAGGTFRNYV
MGWFRQAPGKEREFVTAISTGGSWTGYVDSVKDRFTISRDNTKNTVYLQMASLKPEDTAVYYCAATTPATTY
LPRSERQYDYWGQGTQVTVSS
>RANKL6-ALB1-RANKL18, SEQ ID NO: 705; PRT; ->
EVQLVESGGGLMQTGGSLRLSCAASGVTYSYYTASWFRQAPGKEREFVAAISPSGNTYYADSVKGRFTISRD
NGKHTMYLQMNSLNPEDTAVYFCAIRATDSIYYASSYRHWGQGTQVTVSSGGGGSGGGSEVQLVESGGGLVQ
PGNSLRLSCAASGFTFRSFGMSWVRQAPGKEPEWVSSISGSGSDTLYADSVKGRFTISRDNAKTTLYLQMNS
LKPEDTAVYYCTIGGSLSRSSQGTQVTVSSGGGGSGGGSEVQLVESGGGLVQAGGSLRLSCAASGRTFSRSA
MGWFRQAPGKEREFVGFITGSGGTTYYGESVKGRFTISRDNAQNPVYLQMNSLKPEDTAVYYCGVYRRTHIS
STYSESSEYDYWGQGTQVTVSS
>RANKL9-ALB1-RANKL3, SEQ ID NO: 706; PRT; ->
EVQLVESGGGLVQAGGSLRLTCAASGRTFRSYAMGWFRQAPGKEREFVAAINYSGGSTNYADSVKGRFTISR
DNAKNTLYLQMNSLEPEDTAVYYCAAGSGYASLSYYSTERAYTYWGQGTQVTVSSGGGGSGGGSEVQLVESG
GGLVQPGNSLRLSCAASGFTFRSFGMSWVRQAPGKEPEWVSSISGSGSDTLYADSVKGRFTISRDNAKTTLY
LQMNSLKPEDTAVYYCTIGGSLSRSSQGTQVTVSSGGGGSGGGSEVQLVESGGKLVQAGGSLRLSCAVSGRT
SSIYNMAWFRQGPGKGRESVGRIYWSDDNTYYADSVKGRFTISRDNATNTVYLQMNSLKPEDTAVYYCAGKT
TKWSLEYDYWGQGTQVTVSS
>RANKL9-ALB1-RANKL6, SEQ ID NO: 707; PRT; ->
EVQLVESGGGLVQAGGSLRLTCAASGRTFRSYAMGWFRQAPGKEREFVAAINYSGGSTNYADSVKGRFTISR
DNAKNTLYLQMNSLEPEDTAVYYCAAGSGYASLSYYSTERAYTYWGQGTQVTVSSGGGGSGGGSEVQLVESG
GGLVQPGNSLRLSCAASGFTFRSFGMSWVRQAPGKEPEWVSSISGSGSDTLYADSVKGRFTISRDNAKTTLY
LQMNSLKPEDTAVYYCTIGGSLSRSSQGTQVTVSSGGGGSGGGSEVQLVESGGGLMQTGGSLRLSCAASGVT
YSYYTASWFRQAPGKEREFVAAISPSGNTYYADSVKGRFTISRDNGKHTMYLQMNSLNPEDTAVYFCAIRAT
DSIYYASSYRHWGQGTQVTVSS
>RANKL90 | RANKL9-ALB1-RANKL9, SEQ ID NO: 708; PRT; ->
EVQLVESGGGLVQAGGSLRLTCAASGRTFRSYAMGWFRQAPGKEREFVAAINYSGGSTNYADSVKGRFTISR
DNAKNTLYLQMNSLEPEDTAVYYCAAGSGYASLSYYSTERAYTYWGQGTQVTVSSGGGGSGGGSEVQLVESG
GGLVQPGNSLRLSCAASGFTFRSFGMSWVRQAPGKEPEWVSSISGSGSDTLYADSVKGRFTISRDNAKTTLY
LQMNSLKPEDTAVYYCTIGGSLSRSSQGTQVTVSSGGGGSGGGSEVQLVESGGGLVQAGGSLRLTCAASGRT
FRSYAMGWFRQAPGKEREFVAAINYSGGSTNYADSVKGRFTISRDNAKNTLYLQMNSLEPEDTAVYYCAAGS
GYASLSYYSTERAYTYWGQGTQVTVSS
>RANKL9-ALB1-RANKL13, SEQ ID NO: 709; PRT; ->
EVQLVESGGGLVQAGGSLRLTCAASGRTFRSYAMGWFRQAPGKEREFVAAINYSGGSTNYADSVKGRFTISR
DNAKNTLYLQMNSLEPEDTAVYYCAAGSGYASLSYYSTERAYTYWGQGTQVTVSSGGGGSGGGSEVQLVESG
GGLVQPGNSLRLSCAASGFTFRSFGMSWVRQAPGKEPEWVSSISGSGSDTLYADSVKGRFTISRDNAKTTLY
LQMNSLKPEDTAVYYCTIGGSLSRSSQGTQVTVSSGGGGSGGGSEVQLVESGGGLVQAGGSLRLSCAASGRT
FRSYPMGWFRQAPGKEREFVASITGSGGSTYYADSVKGRFTISRDNAKNTVYLQMNSLRPEDTAVYSCAAYI
RPDTYLSRDYRKYDYWGQGTQVTVSS
>RANKL9-ALB1-RANKL15, SEQ ID NO: 710; PRT; ->
EVQLVESGGGLVQAGGSLRLTCAASGRTFRSYAMGWFRQAPGKEREFVAAINYSGGSTNYADSVKGRFTISR
DNAKNTLYLQMNSLEPEDTAVYYCAAGSGYASLSYYSTERAYTYWGQGTQVTVSSGGGGSGGGSEVQLVESG
GGLVQPGNSLRLSCAASGFTFRSFGMSWVRQAPGKEPEWVSSISGSGSDTLYADSVKGRFTISRDNAKTTLY
LQMNSLKPEDTAVYYCTIGGSLSRSSQGTQVTVSSGGGGSGGGSEVQLVESGGGLVQAGGSLRLSCAAAGGT
FRNYVMGWFRQAPGKEREFVTAISTGGSWTGYVDSVKDRFTISRDNTKNTVYLQMASLKPEDTAVYYCAATT
PATTYLPRSERQYDYWGQGTQVTVSS
>RANKL9-ALB1-RANKL18, SEQ ID NO: 711; PRT; ->
EVQLVESGGGLVQAGGSLRLTCAASGRTFRSYAMGWFRQAPGKEREFVAAINYSGGSTNYADSVKGRFTISR
DNAKNTLYLQMNSLEPEDTAVYYCAAGSGYASLSYYSTERAYTYWGQGTQVTVSSGGGGSGGGSEVQLVESG
GGLVQPGNSLRLSCAASGFTFRSFGMSWVRQAPGKEPEWVSSISGSGSDTLYADSVKGRFTISRDNAKTTLY
LQMNSLKPEDTAVYYCTIGGSLSRSSQGTQVTVSSGGGGSGGGSEVQLVESGGGLVQAGGSLRLSCAASGRT
FSRSAMGWFRQAPGKEREFVGFITGSGGTTYYGESVKGRFTISRDNAQNPVYLQMNSLKPEDTAVYYCGVYR
RIHISSTYSESSEYDYWGQGTQVTVSS
>RANKL13-ALB1-RANKL3, SEQ ID NO: 712; PRT; ->
EVQLVESGGGLVQAGGSLRLSCAASGRTFRSYPMGWFRQAPGKEREFVASITGSGGSTYYADSVKGRFTISR
DNAKNTVYLQMNSLRPEDTAVYSCAAYIRPDTYLSRDYRKYDYWGQGTQVTVSSGGGGSGGGSEVQLVESGG
GLVQPGNSLRLSCAASGFTFRSFGMSWVRQAPGKEPEWVSSISGSGSDTLYADSVKGRFTISRDNAKTTLYL
QMNSLKPEDTAVYYCTIGGSLSRSSQGTQVTVSSGGGGSGGGSEVQLVESGGKLVQAGGSLRLSCAVSGRTS
SIYNMAWFRQGPGKGRESVGRIYWSDDNTYYADSVKGRFTISRDNATNTVYLQMNSLKPEDTAVYYCAGKTT
KWSLEYDYWGQGTQVTVSS
>RANKL13-ALB1-RANKL6, SEQ ID NO: 713; PRT; ->
EVQLVESGGGLVQAGGSLRLSCAASGRTFRSYPMGWFRQAPGKEREFVASITGSGGSTYYADSVKGRFTISR
DNAKNTVYLQMNSLRPEDTAVYSCAAYIRPDTYLSRDYRKYDYWGQGTQVTVSSGGGGSGGGSEVQLVESGG
GLVQPGNSLRLSCAASGFTFRSFGMSWVRQAPGKEPEWVSSISGSGSDTLYADSVKGRFTISRDNAKTTLYL
QMNSLKPEDTAVYYCTIGGSLSRSSQGTQVTVSSGGGGSGGGSEVQLVESGGGLMQTGGSLRLSCAASGVTY
SYYTASWFRQAPGKEREFVAAISPSGNTYYADSVKGRFTISRDNGKHTMYLQMNSLNPEDTAVYFCAIRATD
SIYYASSYRHWGQGTQVTVSS
>RANKL13-ALB1-RANKL9, SEQ ID NO: 714; PRT; ->
EVQLVESGGGLVQAGGSLRLSCAASGRTFRSYPMGWFRQAPGKEREFVASITGSGGSTYYADSVKGRFTISR
DNAKNTVYLQMNSLRPEDTAVYSCAAYIRPDTYLSRDYRKYDYWGQGTQVTVSSGGGGSGGGSEVQLVESGG
GLVQPGNSLRLSCAASGFTFRSFGMSWVRQAPGKEPEWVSSISGSGSDTLYADSVKGRFTISRDNAKTTLYL
QMNSLKPEDTAVYYCTIGGSLSRSSQGTQVTVSSGGGGSGGGSEVQLVESGGGLVQAGGSLRLTCAASGRTF
RSYAMGWFRQAPGKEREFVAAINYSGGSTNYADSVKGRFTISRDNAKNTLYLQMNSLEPEDTAVYYCAAGSG
YASLSYYSTERAYTYWGQGTQVTVSS
>RANKL130 | RANKL13-ALB1-RANKL13, SEQ ID NO: 715; PRT; ->
EVQLVESGGGLVQAGGSLRLSCAASGRTFRSYPMGWFRQAPGKEREFVASITGSGGSTYYADSVKGRFTISR
DNAKNTVYLQMNSLRPEDTAVYSCAAYIRPDTYLSRDYRKYDYWGQGTQVTVSSGGGGSGGGSEVQLVESGG
GLVQPGNSLRLSCAASGFTFRSFGMSWVRQAPGKEPEWVSSISGSGSDTLYADSVKGRFTISRDNAKTTLYL
QMNSLKPEDTAVYYCTIGGSLSRSSQGTQVTVSSGGGGSGGGSEVQLVESGGGLVQAGGSLRLSCAASGRTF
RSYPMGWFRQAPGKEREFVASITGSGGSTYYADSVKGRFTISRDNAKNTVYLQMNSLRPEDTAVYSCAAYIR
PDTYLSRDYRKYDYWGQGTQVTVSS
>RANKL13-ALB1-RANKL15, SEQ ID NO: 716; PRT; ->
EVQLVESGGGLVQAGGSLRLSCAASGRTFRSYPMGWFRQAPGKEREFVASITGSGGSTYYADSVKGRFTISR
DNAKNTVYLQMNSLRPEDTAVYSCAAYIRPDTYLSRDYRKYDYWGQGTQVTVSSGGGGSGGGSEVQLVESGG
GLVQPGNSLRLSCAASGFTFRSFGMSWVRQAPGKEPEWVSSISGSGSDTLYADSVKGRFTISRDNAKTTLYL
QMNSLKPEDTAVYYCTIGGSLSRSSQGTQVTVSSGGGGSGGGSEVQLVESGGGLVQAGGSLRLSCAAAGGTF
RNYVMGWFRQAPGKEREFVTAISTGGSWTGYVDSVKDRFTISRDNTKNTVYLQMASLKPEDTAVYYCAATTP
ATTYLPRSERQYDYWGQGTQVTVSS
>RANKL13-ALB1-RANKL18, SEQ ID NO: 717; PRT; ->
EVQLVESGGGLVQAGGSLRLSCAASGRTFRSYPMGWFRQAPGKEREFVASITGSGGSTYYADSVKGRFTISR
DNAKNTVYLQMNSLRPEDTAVYSCAAYIRPDTYLSRDYRKYDYWGQGTQVTVSSGGGGSGGGSEVQLVESGG
GLVQPGNSLRLSCAASGFTFRSFSGSWVRQAPGKEPEWVSSISGSGSDTLYADSVKGRFTISRDNAKTTLYL
QMNSLKPEDTAVYYCTIGGSLSRSSQGTQVTVSSGGGGSGGGSEVQLVESGGGLVQAGGSLRLSCAASGRTF
SRSAMGWFRQAPGKEREFVGFITGSGGTTYYGESVKGRFTISRDNAQNPVYLQMNSLKPEDTAVYYCGVYRR
THISSTYSESSEYDYWGQGTQVTVSS
>RANKL15-ALB1-RANKL3, SEQ ID NO: 718; PRT; ->
EVQLVESGGGLVQAGGSLRLSCAAAGGTFRNYVMGWFRQAPGKEREFVTAISTGGSWTGYVDSVKDRFTISR
DNTKNTVYLQMASLKPEDTAVYYCAATTPATTYLPRSERQYDYWGQGTQVTVSSGGGGSGGGSEVQLVESGG
GLVQPGNSLRLSCAASGFTFRSFGMSWVRQAPGKEPEWVSSISGSGSDTLYADSVKGRFTISRDNAKTTLYL
QMNSLKPEDTAVYYCTIGGSLSRSSQGTQVTVSSGGGGSGGGSEVQLVESGGKLVQAGGSLRLSCAVSGRTS
SIYNMAWFRQGPGKGRESVGRIYWSDDNTYYADSVKGRFTISRDNATNTVYLQMNSLKPEDTAVYYCAGKTT
KWSLEYDYWGQGTQVTVSS
>RANKL15-ALB1-RANKL6, SEQ ID NO: 719; PRT; ->
EVQLVESGGGLVQAGGSLRLSCAAAGGTFRNYVMGWFRQAPGKEREFVTAISTGGSWTGYVDSVKDRFTISR
DNTKNTVYLQMASLKPEDTAVYYCAATTPATTYLPRSERQYDYWGQGTQVTVSSGGGGSGGGSEVQLVESGG
GLVQPGNSLRLSCAASGFTFRSFGMSWVRQAPGKEPEWVSSISGSGSDTLYADSVKGRFTISRDNAKTTLYL
QMNSLKPEDTAVYYCTIGGSLSRSSQGTQVTVSSGGGGSGGGSEVQLVESGGGLMQTGGSLRLSCAASGVTY
SYYTASWFRQAPGKEREFVAAISPSGNTYYADSVKGRFTISRDNGKHTMYLQMNSLNPEDTAVYFCAIRATD
SIYYASSYRHWGQGTQVTVSS
>RANKL15-ALB1-RANKL9, SEQ ID NO: 720; PRT; ->
EVQLVESGGGLVQAGGSLRLSCAAAGGTFRNYVMGWFRQAPGKEREFVTAISTGGSWTGYVDSVKDRFTISR
DNTKNTVYLQMASLKPEDTAVYYCAATTPATTYLPRSERQYDYWGQGTQVTVSSGGGGSGGGSEVQLVESGG
GLVQPGNSLRLSCAASGFTFRSFGMSWVRQAPGKEPEWVSSISGSGSDTLYADSVKGRFTISRDNAKTTLYL
QMNSLKPEDTAVYYCTIGGSLSRSSQGTQVTVSSGGGGSGGGSEVQLVESGGGLVQAGGSLRLTCAASGRTF
RSYAMGWFRQAPGKEREFVAAINYSGGSTNYADSVKGRFTISRDNAKNTLYLQMNSLEPEDTAVYYCAAGSG
YASLSYYSTERAYTYWGQGTQVTVSS
>RANKL15-ALB1-RANKL13, SEQ ID NO: 721; PRT; ->
EVQLVESGGGLVQAGGSLRLSCAAAGGTFRNYVMGWFRQAPGKEREFVTAISTGGSWTGYVDSVKDRFTISR
DNTKNTVYLQMASLKPEDTAVYYCAATTPATTYLPRSERQYDYWGQGTQVTVSSGGGGSGGGSEVQLVESGG
GLVQPGNSLRLSCAASGFTFRSFGMSWVRQAPGKEPEWVSSISGSGSDTLYADSVKGRFTISRDNAKTTLYL
QMNSLKPEDTAVYYCTIGGSLSRSSQGTQVTVSSGGGGSGGGSEVQLVESGGGLVQAGGSLRLSCAASGRTF
RSYPMGWFRQAPGKEREFVASITGSGGSTYYADSVKGRFTISRDNAKNTVYLQMNSLRPEDTAVYSCAAYIR
PDTYLSRDYRKYDYWGQGTQVTVSS
>RANKL150 | RANKL15-ALB1-RANKL15, SEQ ID NO: 722; PRT; ->
EVQLVESGGGLVQAGGSLRLSCAAAGGTFRNYVMGWFRQAPGKEREFVTAISTGGSWTGYVDSVKDRFTISR
DNTKNTVYLQMASLKPEDTAVYYCAATTPATTYLPRSERQYDYWGQGTQVTVSSGGGGSGGGSEVQLVESGG
GLVQPGNSLRLSCAASGFTFRSFGMSWVRQAPGKEPEWVSSISGSGSDTLYADSVKGRFTISRDNAKTTLYL
QMNSLKPEDTAVYYCTIGGSLSRSSQGTQVTVSSGGGGSGGGSEVQLVESGGGLVQAGGSLRLSCAAAGGTF
RNYVMGWFRQAPGKEREFVTAISTGGSWTGYVDSVKDRFTISRDNTKNTVYLQMASLKPEDTAVYYCAATTP
ATTYLPRSERQYDYWGQGTQVTVSS
>RANKL15-ALB1-RANKL18, SEQ ID NO: 723; PRT; ->
EVQLVESGGGLVQAGGSLRLSCAAAGGTFRNYVMGWFRQAPGKEREFVTAISTGGSWTGYVDSVKDRFTISR
DNTKNTVYLQMASLKPEDTAVYYCAATTPATTYLPRSERQYDYWGQGTQVTVSSGGGGSGGGSEVQLVESGG
GLVQPGNSLRLSCAASGFTFRSFGMSWVRQAPGKEPEWVSSISGSGSDTLYADSVKGRFTISRDNAKTTLYL
QMNSLKPEDTAVYYCTIGGSLSRSSQGTQVTVSSGGGGSGGGSEVQLVESGGGLVQAGGSLRLSCAASGRTF
SRSAMGWFRQAPGKEREFVGFITGSGGTTYYGESVKGRFTISRDNAQNPVYLQMNSLKPEDTAVYYCGVYRR
THISSTYSESSEYDYWGQGTQVTVSS
>RANKL18-ALB1-RANKL3, SEQ ID NO: 724; PRT; ->
EVQLVESGGGLVQAGGSLRLSCAASGRTFSRSAMGWFRQAPGKEREFVGFITGSGGTTYYGESVKGRFTISR
DNAQNPVYLQMNSLKPEDTAVYYCGVYRRTHISSTYSESSEYDYWGQGTQVTVSSGGGGSGGGSEVQLVESG
GGLVQPGNSLRLSCAASGFTFRSFGMSWVRQAPGKEPEWVSSISGSGSDTLYADSVKGRFTISRDNAKTTLY
LQMNSLKPEDTAVYYCTIGGSLSRSSQGTQVTVSSGGGGSGGGSEVQLVESGGKLVQAGGSLRLSCAVSGRT
SSIYNMAWFRQGPGKGRESVGRIYWSDDNTYYADSVKGRFTISRDNATNTVYLQMNSLKPEDTAVYYCAGKT
TKWSLEYDYWGQGTQVTVSS
>RANKL18-ALB1-RANKL6, SEQ ID NO: 725; PRT; ->
EVQLVESGGGLVQAGGSLRLSCAASGRTFSRSAMGWFRQAPGKEREFVGFITGSGGTTYYGESVKGRFTISR
DNAQNPVYLQMNSLKPEDTAVYYCGVYRRTHISSTYSESSEYDYWGQGTQVTVSSGGGGSGGGSEVQLVESG
GGLVQPGNSLRLSCAASGFTFRSFGMSWVRQAPGKEPEWVSSISGSGSDTLYADSVKGRFTISRDNAKTTLY
LQMNSLKPEDTAVYYCTIGGSLSRSSQGTQVTVSSGGGGSGGGSEVQLVESGGGLMQTGGSLRLSCAASGVT
YSYYTASWFRQAPGKEREFVAAISPSGNTYYADSVKGRFTISRDNGKHTMYLQMNSLNPEDTAVYFCAIRAT
DSIYYASSYRHWGQGTQVTVSS
>RANKL18-ALB1-RANKL9, SEQ ID NO: 726; PRT; ->
EVQLVESGGGLVQAGGSLRLSCAASGRTFSRSAMGWFRQAPGKEREFVGFITGSGGTTYYGESVKGRFTISR
DNAQNPVYLQMNSLKPEDTAVYYCGVYRRTHISSTYSESSEYDYWGQGTQVTVSSGGGGSGGGSEVQLVESG
GGLVQPGNSLRLSCAASGFTFRSFGMSWVRQAPGKEPEWVSSISGSGSDTLYADSVKGRFTISRDNAKTTLY
LQMNSLKPEDTAVYYCTIGGSLSRSSQGTQVTVSSGGGGSGGGSEVQLVESGGGLVQAGGSLRLTCAASGRT
FRSYAMGWFRQAPGKEREFVAAINYSGGSTNYADSVKGRFTISRDNAKNTLYLQMNSLEPEDTAVYYCAAGS
GYASLSYYSTERAYTYWGQGTQVTVSS
>RANKL18-ALB1-RANKL13, SEQ ID NO: 727; PRT; ->
EVQLVESGGGLVQAGGSLRLSCAASGRTFSRSAMGWFRQAPGKEREFVGFITGSGGTTYYGESVKGRFTISR
DNAQNPVYLQMNSLKPEDTAVYYCGVYRRTHISSTYSESSEYDYWGQGTQVTVSSGGGGSGGGSEVQLVESG
GGLVQPGNSLRLSCAASGFTFRSFGMSWVRQAPGKEPEWVSSISGSGSDTLYADSVKGRFTISRDNAKTTLY
LQMNSLKPEDTAVYYCTIGGSLSRSSQGTQVTVSSGGGGSGGGSEVQLVESGGGLVQAGGSLRLSCAASGRT
FRSYPMGWFRQAPGKEREFVASITGSGGSTYYADSVKGRFTISRDNAKNTVYLQMNSLRPEDTAVYSCAAYI
RPDTYLSRDYRKYDYWGQGTQVTVSS
>RANKL18-ALB1-RANKL15, SEQ ID NO: 728; PRT; ->
EVQLVESGGGLVQAGGSLRLSCAASGRTFSRSAMGWFRQAPGKEREFVGFITGSGGTTYYGESVKGRFTISR
DNAQNPVYLQMNSLKPEDTAVYYCGVYRRTHISSTYSESSEYDYWGQGTQVTVSSGGGGSGGGSEVQLVESG
GGLVQPGNSLRLSCAASGFTFRSFGMSWVRQAPGKEPEWVSSISGSGSDTLYADSVKGRFTISRDNAKTTLY
LQMNSLKPEDTAVYYCTIGGSLSRSSQGTQVTVSSGGGGSGGGSEVQLVESGGGLVQAGGSLRLSCAAAGGT
FRNYVMGWFRQAPGKEREFVTAISTGGSWTGYVDSVKDRFTISRDNTKNTVYLQMASLKPEDTAVYYCAATT
PATTYLPRSERQYDYWGQGTQVTVSS
>RANKL180 | RANKL18-ALB1-RANKL18, SEQ ID NO: 729; PRT; ->
EVQLVESGGGLVQAGGSLRLSCAASGRTFSRSAMGWFRQAPGKEREFVGFITGSGGTTYYGESVKGRFTISR
DNAQNPVYLQMNSLKPEDTAVYYCGVYRRTHISSTYSESSEYDYWGQGTQVTVSSGGGGSGGGSEVQLVESG
GGLVQPGNSLRLSCAASGFTFRSFGMSWVRQAPGKEPEWVSSISGSGSDTLYADSVKGRFTISRDNAKTTLY
LQMNSLKPEDTAVYYCTIGGSLSRSSQGTQVTVSSGGGGSGGGSEVQLVESGGGLVQAGGSLRLSCAASGRT
FSRSAMGWFRQAPGKEREFVGFITGSGGTTYYGESVKGRFTISRDNAQNPVYLQMNSLKPEDTAVYYCGVYR
RTYISSTYSESSEYDYWGQGTQVTVSS

TABLE B-5

Humanized Nanobodies against RANK-L

<Name, SEQ ID #; PRT (protein); ->
Sequence
>RANKL6humbasic, SEQ ID NO: 730; PRT; ->
EVQLVESGGGLMQTGGSLRLSCAASGVTYSYYTASWFRQAPGKGREFVAAISPSGNTYYADSVKGRFTISR
DNGKHTLYLQMNSLRPEDTAVYFCAIRATDSIYYASSYRHWGQGTLVTVSS
>RANKL6hum1, SEQ ID NO: 731; PRT; ->
EVQLVESGGGLVQTGGSLRLSCAASGVTYSYYTASWFRQAPGKGREFVAAISPSGNTYYADSVKGRFTISR
DNGKHTLYLQMNSLRPEDTAVYFCAIRATDSIYYASSYRHWGQGTLVTVSS
>RANKL6hum2, SEQ ID NO: 732; PRT; ->
EVQLVESGGGLMQPGGSLRLSCAASGVTYSYYTASWFRQAPGKGREFVAAISPSGNTYYADSVKGRFTISR
DNGKHTLYLQMNSLRPEDTAVYFCAIRATDSIYYASSYRHWGQGTLVTVSS
>RANKL6hum3, SEQ ID NO: 733; PRT; ->
EVQLVESGGGLMQTGGSLRLSCAASGVTYSYYTASWFRQAPGKGREFVAAISPSGNTYYADSVKGRFTISR
DNSKHTLYLQMNSLRPEDTAVYFCAIRATDSIYYASSYRHWGQGTLVTVSS
>RANKL6hum4, SEQ ID NO: 734; PRT; ->
EVQLVESGGGLMQTGGSLRLSCAASGVTYSYYTASWFRQAPGKGREFVAAISPSGNTYYADSVKGRFTISR
DNGKNTLYLQMNSLRPEDTAVYFCAIRATDSIYYASSYRHWGQGTLVTVSS
>RANKL6hum5, SEQ ID NO: 735; PRT; ->
EVQLVESGGGLMQTGGSLRLSCAASGVTYSYYTASWFRQAPGKGREFVAAISPS-GNTYYADSVKGRFTISR
DNGKHTLYLQMNSLRPEDTAVYFCAIRATDSIYYASSYRHWGQGTLVTVSS
>RANKL9humbasic, SEQ ID NO: 736; PRT; ->
EVQLVESGGGLVQPGGSLRLTCAASGRTFRSYAMGWFRQAPGKGREFVAAINYSGGSTNYADSVKGRFTISR
DNAKNTLYLQMNSLEPEDTAVYYCAAGSGYASLSYYSTERAYTYWGQGTLVTVSS
>RANKL9hum1, SEQ ID NO: 737; PRT; ->
EVQLVESGGGLVQPGGSLRLSCAASGRTFRSYAMGWFRQAPGKGREFVAAINYSGGSTNYADSVKGRFTISR
DNAKNTLYLQMNSLEPEDTAVYYCAAGSGYASLSYYSTERAYTYWGQGTLVTVSS
>RANKL9hum2, SEQ ID NO: 738; PRT; ->
EVQLVESGGGLVQPGGSLRLTCAASGRTFRSYAMGWFRQAPGKGREFVSAINYSGGSTNYADSVKGRFTISR
DNAKNTLYLQMNSLEPEDTAVYYCAAGSGYASLSYYSTERAYTYWGQGTLVTVSS
>RANKL9hum3, SEQ ID NO: 739; PRT; ->
EVQLVESGGGLVQPGGSLRLTCAASGRTFRSYAMGWFRQAPGKGREFVAAINYSGGSTNYADSVKGRFTISR
DNAKNTLYLQMNSLRPEDTAVYYCAAGSGYASLSYYSTERAYTYWGQGTLVTVSS
>RANKL18humbasic, SEQ ID NO: 740; PRT; ->
EVQLVESGGGLVQPGGSLRLSCAASGRTFSRSAMGWFRQAPGKGREFVGFITGSGGTTYYGESVKGRFTISR
DNAQNPVYLQMNSLRPEDTAVYYCGVYRRTYISSTYSESSEYDYWGQGTLVTVSS
>RANKL18hum1, SEQ ID NO: 741; PRT; ->
EVQLVESGGGLVQPGGSLRLSCAASGRTFSRSAMGWFRQAPGKGREFVGFITGSGGTTYYGESVKGRFTISR
DNAQNTLYLQMNSLRPEDTAVYYCGVYRRTYISSTYSESSEYDYWGQGTLVTVSS
>RANKL18hum2, SEQ ID NO: 742; PRT; ->
EVQLVESGGGLVQPGGSLRLSCAASGRTFSRSAMGWFRQAPGKGREFVGFITGSGGTTYYADSVKGRFTISR
DNAQNPVYLQMNSLRPEDTAVYYCGVYRRTYISSTYSESSEYDYWGQGTLVTVSS
>RANKL18hum3, SEQ ID NO: 743; PRT; ->
EVQLVESGGGLVQPGGSLRLSCAASGFTFSRSAMGWFRQAPGKGREFVGFITGSGGTTYYGESVKGRFTISR
DNAQNPVYLQMNSLRPEDTAVYYCGVYRRTYISSTYSESSEYDYWGQGTLVTVSS
>RANKL18hum4, SEQ ID NO: 744; PRT; ->
EVQLVESGGGLVQPGGSLRLSCAASGRTFSRSAMGWFRQAPGKGREFVSFITGSGGTTYYGESVKGRFTISR
DNAQNPVYLQMNSLRPEDTAVYYCGVYRRTYISSTYSESSEYDYWGQGTLVTVSS
>RANKL18hum5, SEQ ID NO: 745; PRT; ->
EVQLVESGGGLVQPGGSLRLSCAASGRTFSRSAMGWFRQAPGKGREFVGFITGSGGTTYYGESVKGRFTISR
DNAQNPVYLQMNSLRPEDTAVYYCAVYRRTYISSTYSESSEYDYWGQGTLVTVSS
>RANKL15humbasic, SEQ ID NO: 746; PRT; ->
EVQLVESGGGLVQPGGSLRLSCAAAGGTFRNYVMGWFRQAPGKGREFVTAISTGGSWTGYVDSVKDRFTISR
DNTKNTLYLQMASLRPEDTAVYYCAATTPATTYLPRSERQYDYWGQGTLVTVSS
>RANKL15hum1, SEQ ID NO: 747; PRT; ->
EVQLVESGGGLVQPGGSLRLSCAASGGTFRNYVMGWFRQAPGKGREFVTAISTGGSWTGYVDSVKDRFTISR
DNTKNTLYLQMASLRPEDTAVYYCAATTPATTYLPRSERQYDYWGQGTLVTVSS
>RANKL15hum2, SEQ ID NO: 748; PRT; ->
EVQLVESGGGLVQPGGSLRLSCAAAGGTFRNYVMGWFRQAPGKGREFVTAISTGGSWTGYVDSVKDRFTISR
DNSKNTLYLQMASLRPEDTAVYYCAATTPATTYLPRSERQYDYWGQGTLVTVSS
>RANKL15hum3, SEQ ID NO: 749; PRT; ->
EVQLVESGGGLVQPGGSLRLSCAAAGGTFRNYVMGWFRQAPGKGREFVTAISTGGSWTGYVDSVKDRFTISR
DNTKNTLYLQMNSLRPEDTAVYYCAATTPATTYLPRSERQYDYWGQGTLVTVSS
>RANKL13humbasic, SEQ ID NO: 750; PRT; ->
EVQLVESGGGLVQPGGSLRLSCAASGRTFRSYPMGWFRQAPGKGREFVASITGSGGSTYYADSVKGRFTISR
DNAKNTLYLQMNSLRPEDTAVYSCAAYIRPDTYLSRDYRKYDYWGQGTLVTVSS
>RANKL13hum1, SEQ ID NO: 751; PRT; ->
EVQLVESGGGLVQPGGSLRLSCAASGFTFRSYPMGWFRQAPGKGREFVASITGSGGSTYYADSVKGRFTISR
DNAKNTLYLQMNSLRPEDTAVYSCAAYIRPDTYLSRDYRKYDYWGQGTLVTVSS
>RANKL13hum1, SEQ ID NO: 752; PRT; ->
EVQLVESGGGLVQPGGSLRLSCAASGRTFSSYPMGWFRQAPGKGREFVASITGSGGSTYYADSVKGRFTISR
DNAKNTLYLQMNSLRPEDTAVYSCAAYIRPDTYLSRDYRKYDYWGQGTLVTVSS
>RANKL13hum2, SEQ ID NO: 753; PRT; ->
EVQLVESGGGLVQPGGSLRLSCAASGRTFRSYPMGWFRQAPGKGREFVSSITGSGGSTYYADSVKGRFTISR
DNAKNTLYLQMNSLRPEDTAVYSCAAYIRPDTYLSRDYRKYDYWGQGTLVTVSS
>RANKL13hum3, SEQ ID NO: 754; PRT; ->
EVQLVESGGGLVQPGGSLRLSCAASGRTFRSYPMGWFRQAPGKGREFVASITGSGGSTYYADSVKGRFTISR
DNAKNTLYLQMNSLRPEDTAVYYCAAYIRPDTYLSRDYRKYDYWGQGTLVTVSS
>RANKL13hum5, SEQ ID NO: 755; PRT; ->
EVQLVESGGGLVQPGGSLRLSCAASGFTFSSYPMGWFRQAPGKGREFVSSITGSGGSTYYADSVKGRFTISR
DNAKNTLYLQMNSLRPEDTAVYYCAAYIRPDTYLSRDYRKYDYWGQGTLVTVSS
>RANKL13hum5_D62E, SEQ ID NO: 756; PRT; ->
EVQLVESGGGLVQPGGSLRLSCAASGFTFSSYPMGWFRQAPGKGREFVSSITGSGGSTYYAESVKGRFTISR
DNAKNTLYLQMNSLRPEDTAVYYCAAYIRPDTYLSRDYRKYDYWGQGTLVTVSS
>RANKL18hum6, SEQ ID NO: 757; PRT; ->
EVQLVESGGGLVQPGGSLRLSCAASGRTFSRSAMGWFRQAPGKGREFVGFITGSGGTTYYADSVKGRFTISR
DNAQNPVYLQMNSLRPEDTAVYYCAVYRRTYISSTYSESSEYDYWGQGTLVTVSS
>RANKL18hum7, SEQ ID NO: 765; PRT; ->
EVQLVESGGGLVQPGGSLRLSCAASGRTFSRSAMGWFRQAPGKGREFVGFITGSGGTTYYADSVKGRFTISR
DNAQNPLYLQMNSLRPEDTAVYYCAVYRRTYISSTYSESSEYDYWGQGTLVTVSS

TABLE B-6

Constructs of the humanized Nanobodies against RANK-L

<Name, SEQ ID #; PRT (protein); ->
Sequence
RANKL001p, SEQ ID NO: 761; PRT; ->
EVQLVESGGGLVQPGGSLRLSCAASGFTFSSYPMGWFRQAPGKGREFVSSITGSGGSTYYADSVKGRFTISR
DNAKNTLYLQMNSLRPEDTAVYYCAAYIRPDTYLSRDYRKYDYWGQGTLVTVSSGGGGSGGGSEVQLVESGG
GLVQPGGSLRLSCAASGFTFSSYPMGWFRQAPGKGREFVSSITGSGGSTYYADSVKGRFTISRDNAKNTLYL
QMNSLRPEDTAVYYCAAYIRPDTYLSRDYRKYDYWGQGTLVTVSSGGGC
RANKL003p, SEQ ID NO: 762; PRT; ->
EVQLVESGGGLVQPGGSLRLSCAASGRTFSRSAMGWFRQAPGKGREFVGFITGSGGTTYYADSVKGRFTISR
DNAQNPVYLQMNSLRPEDTAVYYCAVYRRTYISSTYSESSEYDYWGQGTLVTVSSGGGGSGGGGSGGGGSGG
GGSGGGGSGGGGSEVQLVESGGGLVQPGGSLRLSCAASGRTFSRSAMGWFRQAPGKGREFVGFITGSGGTTY
YADSVKGRFTISRDNAQNPVYLQMNSLRPEDTAVYYCAVYRRTYISSTYSESSEYDYWGQGTLVTVSSGGGC
RANKL18hum6bi_25 | RANKL18hum6-25GS-RANKL18hum6, SEQ ID NO: 768; PRT; ->
EVQLVESGGGLVQPGGSLRLSCAASGRTFSRSAMGWFRQAPGKGREFVGFITGSGGTTYYADSVKGRFTISR
DNAQNPVYLQMNSLRPEDTAVYYCAVYRRTYISSTYSESSEYDYWGQGTLVTVSSGGGGSGGGGSGGGGSGG
GGSGGGGSEVQLVESGGGLVQPGGSLRLSCAASGRTFSRSAMGWFRQAPGKGREFVGFITGSGGTTYYADSV
KGRFTISRDNAQNPVYLQMNSLRPEDTAVYYCAVYRRTYISSTYSESSEYDYWGQGTLVTVSS
RANKL18hum6bi_30 | RANKL18hum6-30GS-RANKL18hum6, SEQ ID NO: 769; PRT; ->
EVQLVESGGGLVQPGGSLRLSCAASGRTFSRSAMGWFRQAPGKGREFVGFITGSGGTTYYADSVKGRFTISR
DNAQNPVYLQMNSLRPEDTAVYYCAVYRRTYISSTYSESSEYDYWGQGTLVTVSSGGGGSGGGGSGGGGSGG
GGSGGGGSGGGGSEVQLVESGGGLVQPGGSLRLSCAASGRTFSRSAMGWFRQAPGKGREFVGFITGSGGTTY
YADSVKGRFTISRDNAQNPVYLQMNSLRPEDTAVYYCAVYRRTYISSTYSESSEYDYWGQGTLVTVSS
RANKL004h | RANKL13hum5-9GS-RANKL13hum5-HSA, SEQ ID NO: 772; PRT; ->
EVQLVESGGGLVQPGGSLRLSCAASGFTFSSYPMGWFRQAPGKGREFVSSITGSGGSTYYADSVKGRFTISR
DNAKNTLYLQMNSLRPEDTAVYYCAAYIRPDTYLSRDYRKYDYWGQGTLVTVSSGGGGSGGGSEVQLVESGG
GLVQPGGSLRLSCAASGFTFSSYPMGWFRQAPGKGREFVSSITGSGGSTYYADSVKGRFTISRDNAKNTLYL
QMNSLRPEDTAVYYCAAYIRPDTYLSRDYRKYDYWGQGTLVTVSSDAHKSEVAHRFKDLGEENFKALVLIAF
AQYLQQCPFEDHVKLVNEVTEFAKTCVADESAENCDKSLHTLFGDKLCTVATLRETYGEMADCCAKQEPERN
ECFLQHKDDNPNLPRLVRPEVDVMCTAFHDNEETFLKKYLYEIARRHPYFYAPELLFFAKRYKAAFTECCQA
ADKAACLLPKLDELRDEGKASSAKQRLKCASLQKFGERAFKAWAVARLSQRFPKAEFAEVSKLVTDLTKVHT
ECCHGDLLECADDRADLAKYICENQDSISSKLKECCEKPLLEKSHCIAEVENDEMPADLPSLAADFVESKDV
CKNYAEAKDVFLGMFLYEYARRHPDYSVVLLLRLAKTYETTLEKCCAAADPHECYAKVFDEFKPLVEEPQNL
IKQNCELFEQLGEYKFQNALLVRYTKKVPQVSTPTLVEVSRNLGKVGSKCCKHPEAKRMPCAEDYLSVVLNQ
LCVLHEKTPVSDRVTKCCTESLVNRRPCFSALEVDETYVPKEFNAETFTFHADICTLSEKERQIKKQTALVE
LVKHKPKATKEQLKAVMDDFAAFVEKCCKADDKETCFAEEGKKLVAASQAALGL
RANKL006h | RANKL18hum6-30GS-RANKL18hum6-HSA, SEQ ID NO: 773; PRT; ->
EVQLVESGGGLVQPGGSLRLSCAASGRTFSRSAMGWFRQAPGKGREFVGFITGSGGTTYYADSVKGRFTISR
DNAQNPVYLQMNSLRPEDTAVYYCAVYRRTYISSTYSESSEYDYWGQGTLVTVSSGGGGSGGGGSGGGGSGG
GGSGGGGSGGGGSEVQLVESGGGLVQPGGSLRLSCAASGRTFSRSAMGWFRQAPGKGREFVGFITGSGGTTY
YADSVKGRFTISRDNAQNPVYLQMNSLRPEDTAVYYCAVYRRTYISSTYSESSEYDYWGQGTLVTVSSDAHK
SEVAHRFKDLGEENFKALVLIAFAQYLQQCPFEDHVKLVNEVTEFAKTCVADESAENCDKSLHTLFGDKLCT
VATLRETYGEMADCCAKQEPERNECFLQHKDDNPNLPRLVRPEVDVMCTAFHDNEETFLKKYLYEIARRHPY
FYAPELLFFAKRYKAAFTECCQAADKAACLLPKLDELRDEGKASSAKQRLKCASLQKGSERAFKAWAVARLS
QRFPKAEFAEVSKLVTDLTKVHTECCHGDLLECADDRADLAKYICENQDSISSKLKECCEKPLLEKSHCIAE
VENDEMPADLPSLAADFVESKDVCKNYAEAKDVFLGMFLYEYARRHPDYSVVLLLRLAKTYETTLEKCCAAA
DPHECYAKVFDEFKPLVEEPQNLIKQNCELFEQLGEYKFQNALLVRYTKKVPQVSTPTLVEVSRNLGKVGSK
CCKHPEAKRMPCAEDYLSVVLNQLCVLHEKTPVSDRVTKCCTESLVNRRPCFSALEVDETYVPKEFNAETFT
FHADICTLSEKERQIKKQTALVELVKHKPKATKEQLKAVMDDFAAFVEKCCKADDKETCFAEEGKKLVAASQ
AALGL
RANKL008a, SEQ ID NO: 759; PRT; ->
EVQLVESGGGLVQPGGSLRLSCAASGFTFSSYPMGWFRQAPGKGREFVSSITGSGGSTYYADSVKGRFTISR
DNAKNTLYLQMNSLRPEDTAVYYCAAYIRPDTYLSRDYRKYDYWGQGTLVTVSSGGGGSGGGSEVQLVESGG
GLVQPGNSLRLSCAASGFTFSSFGMSWVRQAPGKGLEWVSSISGSGSDTLYADSVKGRFTISRDNAKTTLYL
QMNSLRPEDTAVYYCTIGGSLSRSSQGTLVTVSSGGGGSGGGSEVQLVESGGGLVQPGGSLRLSCAASGFTF
SSYPMGWFRQAPGKGREFVSSITGSGGSTYYADSVKGRFTISRDNAKNTLYLQMNSLRPEDTAVYYCAAYIR
PDTYLSRDYRKYDYWGQGTLVTVSS
RANKL010a, SEQ ID NO: 760; PRT; ->
EVQLVESGGGLVQPGGSLRLSCAASGRTFSRSAMGWFRQAPGKGREFVGFITGSGGTTYYADSVKGRFTISR
DNAQNPVYLQMNSLRPEDTAVYYCAVYRRTYISSTYSESSEYDYWGQGTLVTVSSGGGGSGGGSEVQLVESG
GGLVQPGNSLRLSCAASGFTFSSFGMSWVRQAPGKGLEWVSSISGSGSDTLYADSVKGRFTISRDNAKTTLY
LQMNSLRPEDTAVYYCTIGGSLSRSSQGTLVTVSSGGGGSGGGSEVQLVESGGGLVQPGGSLRLSCAASGRT
FSRSAMGWFRQAPGKGREFVGFITGSGGTTYYADSVKGRFTISRDNAQNPVYLQMNSLRPEDTAVYYCAVYR
RTYISSTYSESSEYDYWGQGTLVTVSS
RANKL13hum5-IgG1_1, SEQ ID NO: 774; PRT; ->
EVQLVESGGGLVQPGGSLRLSCAASGFTFSSYPMGWFRQAPGKGREFVSSITGSGGSTYYADSVKGRFTISR
DNAKNTLYLQMNSLRPEDTAVYYCAAYIRPDTYLSRDYRKYDYWGQGTLVTVSSGGGGSGGGSGGGGSGGGS
EPKSSDKTHTCPPCPAPELLGGPSVFLFPPKPKDTLMISRTPEVTCVVVDVSHEDPEVKFNWYVDGVEVHNA
KTKPREEQYNSTYRVVSVLTVLHQDWLNGKEYKCKVSNKALPAPIEKIISKAKGQPREPQVYTLPPSRDELT
KNQVSLTCLVKGFYPSDIAVEWESNGQPENNYKTTPPVLDSDGPFFLYSKLTVDKSRWQQGNVFSCSVMHEA
LHNHYIQKSLSLSPGK
RANKL13hum5-IgG1_2, SEQ ID NO: 775; PRT; ->
EVQLVESGGGLVQPGGSLRLSCAASGFTFSSYPMGWFRQAPGKGREFVSSITGSGGSTYYADSVKGRFTISR
DNAKNTLYLQMNSLRPEDTAVYYCAAYIRPDTYLSRDYRKYDYWGQGTLVTVSSGGGGSGGGSGGGGSGGGS
GGGGSDKTHTCPPCPAPELLGGPSVFLFPPKPKDTLMISRTPEVTCVVVDVSHEDPEVKFNWYVDGVEVHNA
KTKPREEQYNSTYRVVSVLTVLHQDWLNGKEYKCKVSNKALPAPIEKTISKAKGQPREPQVYTLPPSRDELT
KNQVSLTCLVKGFYPSDIAVEWESNGQPENNYKTTPPVLDSDGPFFLYSKLTVDKSRWQQGNVFSCSVMHEA
LHNHYTQKSLSLSPGK
RANKL13hum5-IgG1_3, SEQ ID NO: 776; PRT; ->
EVQLVESGGGLVQPGGSLRLSCAASGFTFSSYPMGWFRQAPGKGREFVSSITGSGGSTYYADSVKGRFTISR
DNAKNTLYLQMNSLRPEDTAVYYCAAYIRPDTYLSRDYRKYDYWGQGTLVTVSSGGGGSGGGSGGGGSGGGS
GGGGSGGGGSCPPCPAPELLGGPSVFLFPPKPKDTLMISRTPEVTCVVVDVSHEDPEVKFNWYVDGVEVHNA
KTKPREEQYNSTYRVVSVLTVLHQDWLNGKEYKCKVSNKALPAPIEKTISKAKGQPREPQVYTLPPSRDELT
KNQVSLTCLVKGFYPSDIAVEWESNGQPENNYKTTPPVLDSDGPFFLYSKLTVDKSRWQQGNVFSCSVMHEA
LHNHYIQKSLSLSPGK
RANKL13hum5-IgG1_4, SEQ ID NO: 777; PRT; ->
EVQLVESGGGLVQPGGSLRLSCAASGFTFSSYPMGWFRQAPGKGREFVSSITGSGGSTYYADSVKGRFTISR
DNAKNTLYLQMNSLRPEDTAVYYCAAYIRPDTYLSRDYRKYDYWGQGTLVTVSSCPPCPAPELLGGPSVFLF
PPKPKDTLMISRTPEVTCVVVDVSHEDPEVKFNWYVDOVEVHNAKTKPREEQYNSTYRVVSVLTVLHQDWLN
GKEYKCKVSNKALPAPIEKTISKAKGQPREPQVYTLPPSRDELTKNQVSLTCLVKGFYPSDIAVEWESNGQP
ENNYKTTPPVLDSDGPFFLYSKLTVDKSRWQQGNVFSCSVMHEALHNHYTQKSLSLSPGK
RANKL13hum5-IgG2_1, SEQ ID NO: 778; PRT; ->
EVQLVESGGGLVQPGGSLRLSCAASGFTFSSYPMGWFRQAPGKGREFVSSITGSGGSTYYADSVKGRFTISR
DNAKNTLYLQMNSLRPEDTAVYYCAAYIRPDTYLSRDYRKYDYWGQGTLVTVSSGGGGSGGGSGGGGSGGGS
GGGSERKCCVECPPCPAPPVAGPSVFLFPPKPKDTLMISRTPEVTCVVVDVSHEDPEVQFNWYVDGMEVHNA
KTKPREEQFNSTFRVVSVLTVVHQDWLNGKEYKCKVSNGSLPAPIEKTISKTKGQPREPQVYTLPPSREEMT
KNQVSLTCLVKSFYPSDIAVEWESNSQPENNYKTTPPMLDSDGSFFLYSKLTVDKSRWQQGNVFSCSVMHEA
LHNHYTQKSLSLSPGK
RANKL13hum5-IgG2_2, SEQ ID NO: 779; PRT; ->
EVQLVESGGGLVQPGGSLRLSCAASGFTFSSYPMGWFRQAPGKGREFVSSITGSGGSTYYADSVKGRFTISR
DNAKNTLYLQMNSLRPEDTAVYYCAAYIRPDTYLSRDYRKYDYWGQGTLVTVSSGGGGSGGGSGGGGSGGGS
GGGGSGGGSGGSCCVECPPCPAPPVAGPSVFLFPPKPKDTLMISRTPEVTCVVVDVSHEDPEVQFNWYVDGM
EVHNAKTKPREEQFNSTFRVVSVLTVVHQDWLNGKEYKCKVSNKGLPAPIEKTISKTKGQPREPQVYTLPPS
REEMTKNQVSLTCLVKGFYPSDIAVEWESNGQPENNYKTTPPMLDSDGSFFLYSKLTVDKSRWQQGNVFSCS
VMHEALHNHYTQKSLSLSPGK
RANKL13hum5-IgG2_3, SEQ ID NO: 780; PRT; ->
EVQLVESGGGLVQPGGSLRLSCAASGFTFSSYPMGWFRQAPGKGREFVSSITGSGGSTYYADSVKGRFTISR
DNAKNTLYLQMNSLRPEDTAVYYCAAYIRPDTYLSRDYRKYDYWGQGTLVTVSSGGGGSGGGSGGGGSGGGS
GGGGSGGGSGGGSGGSCCVECPPCPAPPVAGPSVFLFPPKPKDTLMISRTPEVTCVVVDVSHEDPEVQFNWY
VDGMEVHNAKTKPREEQFNSTFRVVSVLTVVHQDWLNGKEYKCKVSNKGLPAPIEKTISKTKSQPREPQVYT
LPPSREEMTKNQVSLTCLVKGFYPSDIAVEWESNGQPENNYKTTPPMLDSDGSFFLYSKLTVDKSRWQQGNV
FSCSVMHEALHNHYTQKSLSLSPGK
RANKL13hum5-IgG2_4, SEQ ID NO: 781; PRT; ->
EVQLVESGGGLVQPGGSLRLSCAASGFTFSSYPMGWFRQAPGKGREFVSSITGSGGSTYYADSVKGRFTISR
DNAKNTLYLQMNSLRPEDTAVYYCAAYIRPDTYLSRDYRKYDYWGQGTLVTVSSCCVECPPCPAPPVAGPSV
FLFPPKPKDTLMISRTPEVTCVVVDVSHEDPEVQFNWYVDGMEVHNAKTKPREEQFNSTFRVVSVLTVVHQD
WLNGKEYKCKVSNKGLPAPIEKTISKTKGQPREPQVYTLPPSREEMTKNQVSLTCLVKGFYPSDIAVEWESN
GQPENNYKTTPPMLDSDGSFFLYSKLTVDKSRWQQGNVFSCSVMHEALHNHYTQKSLSLSPGK
RANKL18hum6-IgG1_1, SEQ ID NO: 782; PRT; ->
EVQLVESGGGLVQPGGSLRLSCAASGRTFSRSAMGWFRQAPGKGREFVGFITGSGGTTYYADSVKGRFTISR
DNAQNPVYLQMNSLRPEDTAVYYCAVYRRTYISSTYSESSEYDYWGQGTLVTVSSGGGGSGGGSGGGGSGGG
SEPKSSDKTHTCPPCPAPELLGGPSVFLFPPKPKDTLMISRTPEVTCVVVDVSHEDPEVKFNWYVDGVEVHN
AKTKPREEQYNSTYRVVSVLTVLHQDWLNGKEYKCKVSNKALPAPIEKTISKAKGQPREPQVYTLPPSRDEL
TKNQVSLTCLVKGFYPSDIAVEWESNGQPENNYKTTPPVLDSDGPFFLYSKLTVDKSRWQQGNVFSCSVMHE
ALHNHYTQKSLSLSPGK
RANKL18hum6-IgG1_2, SEQ ID NO: 783; PRT; ->
EVQLVESGGGLVQPGGSLRLSCAASGRTFSRSAMGWFRQAPGKGREFVGFITGSGGTTYYADSVKGRFTISR
DNAQNPVYLQMNSLRPEDTAVYYCAVYRRTYISSTYSESSEYDYWGQGTLVTVSSGGGGSGGGSGGGGSGGG
SGGGGSDKTHTCPPCPAPELLGGPSVFLFPPKPKDTLMISRTPEVTCVVVDVSHEDPEVKFNWYVDGVEVHN
AKTKPREEQYNSTYRVVSVLTVLHQDWLNGKEYKCKVSNKALPAPIEKTISKAKGQPREPQVYTLPPSRDEL
TKNQVSLTCLVKGFYPSDIAVEWESNGQPENNYKTTPPVLDSDGPFFLYSKLTVDKSRWQQGNVFSCSVMHE
ALHNHYTQKSLSLSPGK
RANKL18hum6-IgG1_3, SEQ ID NO: 784; PRT; ->
EVQLVESGGGLVQPGGSLRLSCAASGRTFSRSAMGWFRQAPGKGREFVGFITGSGGTTYYADSVKGRFTISR
DNAQNPVYLQMNSLRPEDTAVYYCAVYRRTYISSTYSESSEYDYWGQGTLVTVSSGGGGSGGGSGGGGSGGG
SGGGGSGGGGSCPPCPAPELLGGPSVFLFPPKPKDTLMISRTPEVTCVVVDVSHEDPEVKFNWYVDGVEVHN
AKTKPREEQYNSTYRVVSVLTVLHQDWLNGKEYKCKVSNKALPAPIEKTISKAKGQPREPQVYTLPPSRDEL
TKNQVSLTCLVKGFYPSDIAVEWESNGQPENNYKTTPPVLDSDGPFFLYSKLTVDKSRWQQGNVFSCSVMHE
ALHNHYTQKSLSLSPGK
RANKL18hum6-IgG1_4, SEQ ID NO: 785; PRT; ->
EVQLVESGGGLVQPGGSLRLSCAASGRTFSRSAMGWFRQAPGKGREFVGFITGSGGTTYYADSVKGRFTISR
DNAQNPVYLQMNSLRPEDTAVYYCAVYRRTYISSTYSESSEYDYWGQGTLVTVSSCPPCPAPELLGGPSVFL
FPPKPKDTLMISRTPEVTCVVVDVSHEDPEVKFNWYVDGVEVHNAKTKPREEQYNSTYRVVSVLTVLHQDWL
NGKEYKCKVSNKALPAPIEKTISKAKGQPREPQVYILPPSRDELTKNQVSLTCLVKGFYPSDIAVEWESNGQ
PENNYKTTPPVLDSDGPFFLYSKLTVDKSRWQQGNVFSCSVMHEALHNHYTQKSLSLSPGK
RANKL18hum6-IgG2_1, SEQ ID NO: 786; PRT; ->
EVQLVESGGGLVQPGGSLRLSCAASGRTFSRSAMGWFRQAPGKGREFVGFITGSGGTTYYADSVKGRFTISR
DNAQNPVYLQMNSLRPEDTAVYYCAVYRRTYISSTYSESSEYDYWGQGTLVTVSSGGGGSGGGSGGGGSGGG
SGGGSERKCCVECPPCPAPPVAGPSVFLFPPKPKDTLMISRTPEVTCVVVDVSHEDPEVQFNWYVDGMEVHN
AKTKPREEQFNSTFRVVSVLTVVHQDWLNGKEYKCKVSNKGLPAPIEKTISKTKGQPREPQVYTLPPSREEM
TKNQVSLTCLVKGFYPSDIAVEWESNGQPENNYKTTPPMLDSDGSFFLYSKLTVDKSRWQQGNVFSCSVMHE
ALHNHYTQKSLSLSPGK
RANKL18hum6-IgG2_2, SEQ ID NO: 787; PRT; ->
EVQLVESGGGLVQPGGSLRLSCAASGRTFSRSAMGWFRQAPGKGREFVGFITGSGGTTYYADSVKGRFTISR
DNAQNPVYLQMNSLRPEDTAVYYCAVYRRTYISSTYSESSEYDYWGQGTLVTVSSGGGGSGGGSGGGGSGGG
SGGGGSGGGSGGSCCVECPPCPAPPVAGPSVFLFPPKPKDTLMISRTPEVTCVVVDVSHEDPEVQFNWYVDG
MEVHNAKTKPREEQFNSTFRVVSVLTVVHQDWLNGKEYKCKVSNKGLPAPIEKTISKTKGQPREPQVYTLPP
SREEMTKNQVSLTCLVKGFYPSDIAVEWESNGQPENNYKTTPPMLDSDGSFFLYSKLTVDKSRWQQGNVFSC
SVMHEALHNHYTQKSLSLSPGK
RANKL18hum6-IgG2_3, SEQ ID NO: 788; PRT; ->
EVQLVESGGGLVQPGGSLRLSCAASGRTFSRSAMGWFRQAPGKGREFVGFITGSGGTTYYADSVKGRFTISR
DNAQNPVYLQMNSLRPEDTAVYYCAVYRRTYISSTYSESSEYDYWGQGTLVTVSSGGGGSGGGSGGGGSGGG
SGGGGSGGGSGGGSGGSCCVECPPCPAPPVAGPSVFLFPPKPKDTLMISRTPEVTCVVVDVSHEDPEVQFNW
YVDGMEVHNAKTKPREEQFNSTFRVVSVLTVVHQDWLNGKEYKCKVSNKGLPAPIEKTISKTKGQPREPQVY
TLPPSREEMTKNQVSLTCLVKGFYPSDIAVEWESNGQPENNYKTTPPMLDSDGSFFLYSKLTVDKSRWQQGN
VFSCSVMHEALHNHYTQKSLSLSPGK
RANKL18hum6-IG2_4, SEQ ID NO: 789; PRT; ->
EVQLVESGGGLVQPGGSLRLSCAASGRTFSRSAMGWFRQAPGKGREFVGFITGSGGTTYYADSVKGRFTISR
DNAQNPVYLQMNSLRPEDTAVYYCAVYRRTYISSTYSESSEYDYWGQGTLVTVSSCCVECPPCPAPPVAGPS
VFLFPPKPKDTLMISRTPEVTCVVVDVSHEDPEVQFNWYVDGMEVHNAKTKPREEQFNSTFRVVSVLTVVHQ
DWLNGKEYKCKVSNKGLPAPIEKIISKTKGQPREPQVYTLPPSREEMTKNQVSLTCLVKGFYPSDIAVEWES
NGQPENNYKTTPPMLDSDGSFFLYSKLTVDKSRWQQGNVFSCSVMHEALHNHYTQKSLSLSPGK
CabLys3-Alb11-13H5, SEQ ID NO: 815; PRT; ->
DVQLQASGGGSVQAGGSLRLSCAASGYTIGPYCMGWFRQAPGKEREGVAAINMGGGITYYADSVKGRFTISQ
DNAKNTVYLLMNSLEPEDTAIYYCAADSTIYASYYECGHGLSTGGYGYDSWGQGTQVTVSSGGGGSGGGSEV
QLVESGGGLVQPGNSLRLSCAASGFTFSSFGMSWVRQAPGKGLEWVSSISGSGSDTLYADSVKGRFTISRDN
AKTTLYLQMNSLRPEDTAVYYCTIGGSLSRSSQGTLVTVSSGGGGSGGGSEVQLVESGGGLVQPGGSLRLSC
AASGFTFSSYPMGWFRQAPGKGREFVSSITGSGGSTYYADSVKGRFTISRDNAKNTLYLQMNSLRPEDTAVY
YCAAYIRPDTYLSRDYRKYDYWGQGTLVTVSS
13H5-CabLys3-13H5, SEQ ID NO: 816; PRT; ->
EVQLVESGGGLVQPGGSLRLSCAASGFTFSSYPMGWFRQAPGKGREFVSSITGSGGSTYYADSVKGRFTISR
DNAKNTLYLQMNSLRPEDTAVYYCAAYIRPDTYLSRDYRKYDYWGQGTLVTVSSGGGGSGGGSDVQLQASGG
GSVQAGGSLRLSCAASGYTIGPYCMGWFRQAPGKEREGVAAINMGGGITYYADSVKGRFTISQDNAKNTVYL
LMNSLEPEDTAIYYCAADSTIYASYYECGHGLSTGGYGYDSWGQGTQVTVSSGGGGSGGGSEVQLVESGGGL
VQPGGSLRLSCAASGFTFSSYPMGWFRQAPGKGREFVSSITGSGGSTYYADSVKGRFTISRDNAKNTLYLQM
NSLRPEDTAVYYCAAYIRPDTYLSRDYRKYDYWGQGTLV

TABLE B-7

Nanobodies against human serum albumin

| | | SEQ ID |
|---|---|---|
| Name | Sequence | NO |
| ALB-1 | EVQLVESGGGLVQPGNSLRLSCAASGFTFRSFGMSWVRQAPGKEP | 790 |
| | EWVSSISGSGSDTLYADSVKGRFTISRDNAKTTLYLQMNSLKPEDT | |
| | AVYYCTIGGSLSRSSQGTQVTVSS | |
| ALB-12 | EVQLVESGGGLVQPGNSLRLSCAASGFTFSSFGMSWVRQAPGKGL | 791 |
| | EWVSSISGSGSDTLYADSVKGRFTISRDNAKTTLYLQMNSLRPEDT | |
| | AVYYCTIGGSLSRSSQGTLVTVSS | |

TABLE B-8
Linkers used in the Nanobody constructs

| | | SEQ ID |
|---|---|---|
| Linker | Sequence | NO |
| 9GS linker | GGGGSGGGS | 792 |
| 15GS linker | ggggsggggsggggs | 793 |
| 20GS linker | GGGGSGGGGSGGGGSGGGGS | 794 |
| 25GS linker | ggggsggggsggggsggggsggggs | 795 |
| 30GS linker | GGGGSGGGGSGGGGSGGGGSGGGGSGGGGS | 796 |

TABLE C-1

Anti-RANK-L Nanobody sequences obtained as described in Example 1. The
Nanobody sequences are grouped by family. Unique sequences are indicated.

UNIQUE SEQUENCES
RANKLPMP2G8 (RANKL3)
evqlvesggklvqaggslrlscavsgrtss--
IYNMAwfrqgpgkgresvgRIYWSDDNTYYADSVKGrftisrdnatntvylqmnslkpedtavyycagKTTKWSLEYDY-------wgqgtqvtvss
RANKLPMP2B9 (RANKL2)
evqlvesggglvqpggslrlscaasgftfs--
SYYMSwvrqapgkglewvsSIYSDGSTTDYADSVKGrftisrdnakntlnlqmnslksedtavyycakDANSGGLEYDY-------wgqgtqvtvss
RANKLPMP4H9 (RANKL6)
evqlvesggglmqtggslrlscaasgvtys--YYTASwfrqapgkerefvaAISPSG-
NTYYADSVKGrftisrdngkhtmylqmnslnpedtavyfcaiRATDSIYYASSYRH----wgqgtqvtvss
RANKLPMP4G8 (RANKL5)
evqlvesggglvqaggslrlscaasgrtig--
GPTMAwfrqapgkerdfvaSITSSGSTIFYADSVKGrftisrdngkktmtlemdslkpedtavyycaaKIRGKVTVDYFDYAY---wgqgtqvtvss
RANKLPMP7B4 (RANKL7)
evqlveseggpvqsggslrlscaasgrtfs--
vstiawfrqapgegrefvaaiypsgrnayvadsvkgrftisrdnakktvylqmnslkpedtaayycaahqpsgsyysaeayay---wgqgtqvtvss
RANKLPMP9F10 (RANKL11)
evqlvesggglvqaggslrlscaasgrtfs--
SKTMGwfrqppgnerefvaAITPTSRTTYYADSVKGrftisrdnakntvslqmnslkfedtaayycvaVRRYGSPPHDGSSYEY--wgqgtqvtvss
RANKLPMP9B3 (RANKL10)
evqlvesggglvqaggslrlscaasgitfs--
SRTMGwfrqapgkerefvaAITPSSRTTYYADSVKGrftisrdnakntvllqmnslkpedtavyycaaERTYGSNYTRPTAWNY--wgqgtqvtvss
RANKLPMP4F12 (RANKL4)
kvqlvesggglvqtgdslrlscaasgraig--
SYAMGwfrqapgkerefvaVINYRGSSLKYADRVKGrftisrdnaknmvylqmnslkpddtavyycaaQTSGADFGTTPQRYTY--wgqgtqvtvss
RANKLPMP9B1 (RANKL1)
evqlvesggglvqaggslrlscavsgrtfs--
SSTMAwfrqppggerdfvaSISTSGTRTLYADSVKGrftisrdnakstgylqmnslkpedtavyfcaaVNRRGWEFWRLASGYDY-wglgaqvtvss
RANKLPMP7E3 (RANKL8)
evqlvesgggsvqpggslrlscaasggtfs--
RYAMGwfrqapgkerefvsAISVGGTYQYYVDSVKGrftisrdnaestvylqmnslkpedtavyycagDASPYGYLREYTATRFDYwgqgtqvtvss
RANKLPMP8A11 (RANKL9)
evqlvesggglvqaggslrltcaasgrtfr--
SYAMGwfrqapgkerefvaAINYSGGSTNYADSVKGrftisrdnakntlylqmnslepedtavyycaaGSGYASLSYYSTERAYTYwgqgtqvtvss
FAMILIES
FAMILY 1
RANKLPMP9B6 (RANKL12)
evqlvesgggwmqaggslrlscaasgrtft-----
MAwfrqapgkerefvaAITGSGRSTYYTDSVKGrftisrdnakntaylqmkslkpedtavyycagLRGLG-LEYDSAKS-YSYwgqgtqvtvss
RANKLPMP4B3
evqlvesgggwmqaggslrlscaasgrtft-----
MAwfrqasgkerefvaAITGSGRSTYYTDSVKGrftisrdnakntaylqmkslkpedtavyycagLRGLG-LEYDSAKS-YSYwgqgtqvtvss
FAMILY 2
RANKLPMP1C7 (RANKL13)
evqlvesggglvqaggslrlscaasgrtfr--
SYPMGwfrqapgkerefvaSITGSGGSTYYADSVKGrftisrdnakntvylqmnslrpedtavyscaaYIRPDTYLSRDYRKYDY-wgqgtqvtvss
RANKLPMP2E11
EV*LVESGGGLVQAGGSLRLSCAASGRTFR--
SYPMGWFRQAPGKEREFVASITGSGGSTYYADSVKGRFTISRDNAKNTVYLQMNSLRPEDTAVYSCAAYIRPDTYLSRDYRKYDY-WGQGTQVTVSS
FAMILY 3
RANKLPMP2A6
evqlvesggglvqaggslrlscaasgltss--RYTMSwfrqdpgkerefvaAVPLSG-
NTYYADPVRGrftisrdnakntvdlqmnslkpedtavyycaaRASGSIFNRGS----YAYwgqgtqvtvss
RANKLPMP6B8 (RANKL14)
evqlvesggglvqaggslrlscaasgrtss--YYTMSwfrqdpgkerefvaAVPLSG-
NTYYADPVRGrftisrdnakntadlqmnslkpedtavyycaaRASGSIYNRGS----YAYwgqgtqvtvss
RANKLPMP1F2
evqlvesggglvpaggslrlscaasgltdr--RYTMSwfrqdpgkerefvaAVPLSG-
NTYYADPVRGrftisrdnakntvdlqmnslkpedtavyycaaRASGSIFNRGS----YAYwgqgtqvtvss
RANKLPMP2D4
evqlvesggglvpaggslrlscaasgltdr--RYTMSwfrqdpgkerefvaAVPLSG-
NTYYADPVRGrftisrdnakntvdlqmnslkpedtavyycaaRASGSIFNRGS----YAYwgqgtqvtvss
FAMILY 4
RANKLPMP7B2
evqlvesggglvqaggslrlscaaaggtfr--
NYVMGwfrqapgkerefvtAISTGGSWTGYVDSVKDrftisrdntkntvylqmaslkpedtavyycaaTMPATTYLPR-SERQYDYwgqgtqvtvss
RANKLPMP7C5 (RANKL15)
evqlvesggglvqaggslrlscaaaggtfr--
NYVMGwfrqapgkerefvtAISTGGSWTGYVDSVKDrftisrdntkntvylqmaslkpedtavyycaaTTPATTYLPR-SERQYDYwgqgtqvtvss
RANKLPMP7A11
evqlvesggglvqaggsltlscaaagftfr--
RYVMGwfrqapgkerefvaAISTGGTWTGYVDSVKDrftisrdntkntvylqmaslkpedtavyncaaTTPTTSYLPR-SERQYEYwgqgtqvtvss
RANKLPMP7F1
evqlvesggglvqaggslrlscaaagctfr--
NYVMGwfrqapgkerefvtAISTGGTWTGYVDSVKDrftisrdntkntvnlqmaslkpedtavyycaaTTPTTSYLPR-SERQYEYwgqgtqvtvss
RANKLPMP7H5
evqlvesggglvqaggslrlscaaaggtfr--
NYVMGwfrqapgkerefvaAISTGGSWTGYVDSVKDrftisrdntkntvylqmvslkpedtavyycaaTTPATTYLPR-SERQYDYwgqgtqvtvss
RANKLPMP7E7
evqlvesggglvqaggslrlscaaaggtfr--
NYVMGwfrqapgkerefvtAISAGGSWTGYVDSVKDrftisrdntkntvylqmaslkpedtavyycaaTTPATTYLPR-SERQYDYwgqgtqvtvss
RANKLPMP7E2
evqlvesggglvqaggslrlscaaagytfr--
AYVMGwfrqapgkerefvaGISTGGTWTGYVDSVKDrftisrdntkntvylqmaslkpedtavyycaaTTPVTSYLPR-SERQYEHwgqgtqvtvss
RANKLPMP3H10
evqlvesggglvqsggslrlscaaagytfrARAYVMGwfrqapgkerefvaAISTGGTWTGYVDSVKDrftisrdntkntmylqmaslkpedtavy
ycaaTTPSTSYLPR-SERQYEYwgqgtqvtvss
RANKLPMP7F8
EVQLVESGGGLVQAGGSLRLSCAAAGGTFR--
NYVMGWFRQAPGKEREFVTAISTGGSWTGYVDSVKDRFTISRDNTKNTVYLHMASLKPEDTAVYYCAATTPVTTYLPR-SERQYDYWGQGTQVTVSS
RANKLPMP7F6
EVQLVESGGGLVQAGDSLRLSCAAAGFTFR--
RYVMGWFRQAPGKEREFVAAISTGGTWTGYVDSVKDRFTISRDNTKNTVYLQMASLKPEDTAVYNCAATTPTTSYLPR-SERQYEYWGQGTQVTVSS
FAMILY 5
RANKLPMP7G8 (RANKL5)
evqlvesggglvqaggslrlscvasrrtfs--SYAMGwfrqvpgkerdfvaAISTG-
SITTYGDSVKGrftisrdnakntvylqmnslkpedtavyycaaGKREPYLRQYTASNPYDYwgqgtqvtvss
RANKLPMP7F9
evqlvesggglvqaggslrlscvasrrtfs--SYAMGwfrqvpgkerdfvaAISTG-
SITTYGDSVKGrftisrdnakntvylqmnslkpedtavyycaaGKREPYLRQYTASNPYDYwgqgtqvtvss
RANKLPMP7E6
evqlvesggglvqaggslrlscvaskrtfa--SYAMGwfrqvpgkerdfvaAITTG-
SITTYADSVKGrfaisrdnakntvylqmnslkpedtavyycaaGNREPYLRQYTASNPYDYwgqgtqvtvss
FAMILY 6
RANKLPMP4F4
evqlvesggglvqvgdslrlsceasgrsrf-
STYVMGwfrqapgkerefvaAVSWSSGNAYYIDSAKGrfatsrdtaknimylqmnslkpedtavytcaaGRGYGLLSEYTQAPRYDYwgqgtqvtvss
RANKLPMP9C2 (RANKL17)
evqlvesggglvqvgdslrlsceasgrsrf-
STYVMGwfrqapgkerefvaAVSWSSGNAYYIDSAKGrfatsrdtaknimylqmnslkpedtavytcaaGRGYGLLSEYTQAPRYDYwgqgtqvtvss
RANKLPMP7B11
evqlvesggglvqvgdslrlsceasgrsrf-
STYVMGwfrqapgkerefvaAISWSSGNAYYIDSAKGrfatsrdtaknimylqmnslkpedtavyscaaGRGYGLLSEYTQAARYDYwgqgtqvtvss
FAMILY 7
RANKLPMP9H9
evqlvesggglvqaggslrlscaasgrtfs--
RSAMGwfrqapgkerefvgFITGSGGTTYYGESVKGrftisrdnaqnpvylqmnslkpedtavyycgvYRRTYISSTYSESSEYDYwgqgtqvtvss
RANKLPMP9G3
evqlvesggglvqaggslrlscaasgrtfs--
RSAMGwfrqapgkerefvgFITGSGGTTYYGESVKGrftisrdnaqnpvylqmnslkpedtavyycavYRRTYISSTYNESSEYDYwgqgtqvtvss
RANKLPMP9E3
evqlvesggglvqaggslrlscaasgrtfs--
RSAMGwfrqapgkerefvgFITGSGGTTYYGESVKGrftisrdnaqnpvylqmnslkpedtavyycgvYRRTYISSTYSESSEYDYwgqgtqvtvss
RANKLPMP7H9
evqlvesggglvqaggslrlscaasgrtfs--
RSAMGwfrqapgkerefvgFITGSGGTTYYGESVKGrftisrdnaqnpvylqmnslkpedtavyycgvYRRTYISITYSESSDYDYwgqgtqvtvss
RANKLPMP4C3
evqlvesggglvqaggslrlscaasgrtfs--
ISAMGwfrqapgkerefvcFITGSGGTTYYGESVKGrftisrdnaqnpvylqmnslkpedtavyycgvYRRTYISSTYSESSEYDYwgqgtqvtvss
RANKLPMP9G6
evqlvesggglvqaggslrlscaasgrtfs--
RSAMGwfrqapgkerefvgFITGSGGTTYYGESVKGrftisrdnaqnpvylqmnslkpedtavyycgvYRRTYISSTYSESSEYDYwgqgtqvtvss
RANKLPMP7F11 (RANKL18)
evqlvesggglvqaggslrlscaasgrtfs--
RSAMGwfrqapgkerefvgFITGSGGTTYYGESVKGrftisrdnaqnpvylqmnslkpedtavyycgvYRRTYISSTYSESSEYDYwgqgtqvtvss
RANKLPMP7B12
evqlvesggglvqaggslrlscaasgrtfs--
RSAMGwfrqapgkerefvgFITGSGGTTYYGESVKGrftisrdnaqnpvylqmnslkpedtavyycgvYRRTYISSTYSESSEYDYwgqgtqvtvss
RANKLPMP7G3
evqlvesggglvqaggslrlscaasgrtfs--
RSAMGwfrqapgkerefvgFITGSGGTTYYGESVKGrftisrdnaqnpvylqmnslkpedtavyycavYRRTYISSTYNESSEYDYwgqgtqvtvss
RANKLPMP9C12
evqlvesggglvqaggslrlscaasgrtfs--
RSAMGwfrqapgkerefvgFITGSGGTTYYGESVKGrftisrdnaqnpvylqmnslkpedtavyycgvYRRTYISSTYSESSEYDYwgqgtqvtvss
FAMILY 8
RANKLPMP1D8
evqlvesggglvqagdslrlscaasgrift-----
MGwfrqapgkerefvaAISGSGSITNYADSVKGrftisrdyakttvflqmnslkpedtavyycaaYVRTPYYSSYYDSTKYEYwgqgtqvtvss
RANKLPMP1A2
evqlvesggglvqagdslrlscaasgrtft-----
MGwfrqapgkerefvaFISGSGSVTNYTDSVKGrftisrdhakntvflqmnslkpedtavyycaaYLRGPYYSSFYDSTKYEYwgqgtqvtvss
RANKLPMP6C8 (RANKL19)
evqlvesggglvqagdslrlscaasgrtvt-----
MGwfrqapgkerefvaSITGSGSVTNYADSVKGrftisrdnakntvflqmnslkpedtavyycaaYLPSPYYSSYYDSTKYEYwgqgtqvtvss
RANKLPMP1E5
evqlvesggglvqagdslrlscaasgrtft-----
MGwfrrapgterefvaSISGSGKITNYADSVKGrftisrdhaknavflqmdglkpedtavyycaaYLRSPYYSSYYDSAKYEYwgqgtqvtvss
RANKLPMP2F4 (RANKL20)
evqlvesggglvqagdslrlscaasgrtft-----
MGwfrqapgterefvaAISGSGKITNYADSVKGrftisrdhakntvflqmdslkpedtavyycagYLRSPYYSSFYDSAKYEYwgqgtqvtvss
RANKLPMP2B8
evqlvesgggsvqagdslrlscaasgrtft-----
MGwfrqapgterefvaAISGSGKITNYADSVKGrftisrdhamntvflqmdslkpedtavyycaaYLRSPYYSSYYDSAKYEYwgqgtqvtvss
RANKLPMP2C5
evqlvesggglvqagdslrlscaasgrtft-----
MGwfrqapgterefvaAISGSGKITNYADSVKGrftisrdhakntvflqmdslkpedtavyycaaYLRSPYYSSYYDSAKYEYwgqgtqvtvss
RANKLPMP2B4
evqlvesggglvqagdslrlscaasgrtft-----
MGwfrqapgterefvaAISGSGKITNYADSVKgrftisrdhakntvflqmdslkpedtavyycaaYLRSPYYSSYYDSAKYEYwgqgtqvtvss
RANKLPMP2A5
evqlvesggglvqagdslrlscaasgrtft-----
MGwfrqapgterefvaAISGSGKITNYADSVKGrftisrdhakntvflqmdslkpedtavyycaaYLRSPYYSSYYDSAKYEYwgqgtqvtvss
RANKLPMP2D7
evqlvesggglvqagdslrlscaasgrtft-----
MGwfrqapgterefvaAISGSGKITNYADSVKGrftisrdhakntvflqmdslkpedtavyycaaYLRSPYYSSYYDSAKYEYwgqgtqvtvss
RANKLPMP2G4
evqlvesggglvqagdslrlscaasgrtft-----
MGwfrqapgterefvaAISGSGKITNYADSVKGrftisrdhakntvflqmdslkpedtavyycaaYLRSPYYSSYYDSAKYEYwgqgtqvtvss
FAMILY 9
RANKLPMP7A8
emqlvesggglvqaggslrlscvaskrtfa--SYAMGwfrqvpgkerdfvaAISTH-
SITVYADSVKGrftisrdnakntvylqmntlkpedtavyycaaGNREPYLRQYlASNPYDYwgqgtqvtvss
RANKLPMP7C6 (RANKL21)
evqlvesggglvqaggslrlscvasrrtfn--SYAVGwfrqvpgeerdfvaAISTG-
SVTIYADSVKGrftisrdnakntvylqmnslkpedtavyycaaGNREPYLRQYTASNPYDYwgqgtqvtvss
RANKLPMP7A5
evqlvesggglvqtggslrlscvasrrtfs--SYAVGwfrqvpgkerdfvaAISTG-
SVTIYADSVKGrftisrdntkntvylqmnslkpedtavyycaaGNREPYLRQYTASNPYDYwgqgtqvtvss

TABLE C-2
ED50 values obtained with the
anti-RANK-L Nanobodies in ELISA

| Nanobody | ED50 (pM) |
|---|---|
| RANKL1 | 619 |
| RANKL3 | 568 |
| RANKL4 | 380 |
| RANKL6 | 385 |
| RANKL7 | 376 |
| RANKL8 | 652 |
| RANKL9 | 542 |
| RANKL11 | 517 |
| RANKL12 | 399 |
| RANKL13 | 226 |
| RANKL14 | 574 |
| RANKL15 | 266 |
| RANKL16 | 953 |
| RANKL17 | 453 |
| RANKL18 | 242 |
| RANKL19 | 506 |
| RANKL20 | 306 |
| RANKL21 | 861 |
| RANKL22 | 379 |
| RANKL23 | 679 |

TABLE C-3
IC50 values obtained with the anti-RANK-L
Nanobodies in AlphaScreen assay

| Nanobody | IC50 (pM) |
|---|---|
| RANKL1 | 739 |
| RANKL3 | 497 |
| RANKL4 | 582 |
| RANKL6 | 288 |
| RANKL7 | 459 |
| RANKL8 | 755 |
| RANKL9 | 137 |
| RANKL11 | 1170 |
| RANKL12 | 627 |
| RANKL13 | 185 |
| RANKL14 | 1750 |
| RANKL15 | 283 |
| RANKL16 | 2250 |
| RANKL17 | 737 |
| RANKL18 | 146 |
| RANKL19 | 2240 |
| RANKL20 | 1360 |
| RANKL21 | 1580 |
| RANKL22 | 3020 |
| RANKL23 | 3530 |

TABLE C-4
Dose-dependent binding of Nanobodies to membrane-bound human and cyno RANK-L (PE mean fluorescence)

| Nanobody | human RANK-L | | | | | | cynomolgus RANK-L | | | |
|---|---|---|---|---|---|---|---|---|---|---|
| (pM) | RANKL6 | RANKL9 | RANKL13 | RANKL15 | RANKL18 | irrelevant | RANKL13 | RANKL15 | RANKL18 | irrelevant |
| 2000 | 12752 | 4865 | 13918 | 7724 | 7633 | 87 | 12442 | 10956 | 12032 | 149 |
| 400 | 4579 | 3365 | 5225 | 2641 | 2327 | 90 | 4107 | 3410 | 3488 | 140 |
| 80 | 1697 | 2279 | 1534 | 715 | 649 | 82 | | | | |
| 16 | 434 | 1350 | 499 | 250 | 218 | 77 | | | | |
| 3.2 | 347 | 381 | 220 | 124 | 105 | 84 | | | | |

TABLE C-5
Comparison of monovalent and trivalent bispecific
anti-RANK-L Nanobodies in AlphaScreen

| Nanobody | IC50 (pM) |
|---|---|
| RANKL3 | 474 |
| RANKL6 | 777 |
| RANKL9 | 341 |
| RANKL13 | 147 |
| RANKL15 | 572 |
| RANKL18 | 187 |
| RANKL30 | 44 |
| RANKL60 | 26 |
| RANKL90 | 68 |
| RANKL130 | 29 |
| RANKL150 | 92 |
| RANKL180 | 33 |

TABLE C-6
Comparison of monovalent and trivalent bispecific anti-RANK-L
Nanobodies in cell based competitive binding assay

| Nanobody | IC50 (pM) |
|---|---|
| RANKL13 | 429 |
| RANKL15 | 534 |
| RANKL18 | 552 |
| RANKL130 | 55 |
| RANKL150 | 210 |
| RANKL180 | 106 |

TABLE C-7
Potency of anti-RANK-L Nanobodies
in NF-kappaB reporter gene assay

| Compound | IC50 (nM) |
|---|---|
| RANKL13 | 6.205 ± 3.019 (n = 2) |
| RANKL15 | 10.03 ± 2.390 (n = 2) |
| RANKL18 | 15.24 ± 1.923 (n = 2) |
| RANKL3 | 8.32 ± 3.747 (n = 2) |
| RANKL130 | 2.375 ± 2.379 (n = 2) |
| RANKL150 | 6.24 ± 4.765 (n = 2) |
| RANKL180 | 3.95 ± 0.183 (n = 2) |
| OPG | 6.03 (n = 1) |

TABLE C-8

Primers used for the construction of the human/mouse hybrids
as described in Example 6.

| | | SEQ ID |
|---|---|---|
| Name | Sequence 5′ to 3′ | NO |
| T7-EEV | AAGGCTAGAGTACTTAATACGA | 799 |
| RevpCIneo | CTTATCATGTCTGCTCGAAGC | 800 |
| RevhRANKLM1 | GGGAACCAGATGGGATGGAGGCGGCATTAATAGTGAGATGAG | 801 |
| FwhRANKLM1 | CTCATCTCACTATTAATGCCGCCTCCATCCCATCTGGTTCCC | 802 |
| RevhRANKLM2 | CCATTAGTTGAAGATACTCTGTAGCCACGCTTCCTGAAGTTTCATG | 803 |
| FwhRANKLM2 | CATGAAACTTCAGGAAGCGTGGCTACAGAGTATCTTCAACTAATGG | 804 |
| RevhRANKLM3 | CCATTAGTTGAAGATAGTCTGTAGGTAGGTCTCC | 805 |
| FwhRANKLM3 | GGAGACCTACCTACAGACTATCTTCAACTAATGG | 806 |

TABLE C-9
Binding of RANKL Nanobodies on human/mouse
hybrids of RANK-L as described in Example 6.

| | RANK-L | | | |
|---|---|---|---|---|
| Nanobody | hRANK-L | h/m hybrid 1 | h/m hybrid 2 | h/m hybrid 3 |
| RANKL3 | + | + | + | + |
| RANKL6 | + | + | − | + |
| RANKL9 | + | + | + | − |
| RANKL13 | + | + | − | − |
| RANKL15 | + | + | − | − |
| RANKL18 | + | + | + | − |
| MoAb¹ | + | + | + | + |

¹Monoclonal antibody against human RANK-L (R&D Systems, Minneapolis, MN; Cat No. 6262).

TABLE C-10
Dosing of the animals in the pharmacokinetics and
pharmacodynamics study as described in Example 7.

| | | Dose and route of | |
|---|---|---|---|
| Group | Animal ID | administration | Single/Repeated |
| RANKL130 | 1m | 10 mg/kg (IV bolus) | Single |
| | 2f | 10 mg/kg (IV bolus) | Single |
| RANKL131 | 3m | 15 mg/kg (infusion 8 hrs) | Single |
| | 4f | 15 mg/kg (infusion 8 hrs) | Single |
| RANKL180 | 5m | 10 mg/kg (IV bolus) | Single |
| | 6f | 10 mg/kg (IV bolus) | Single |
| ALB1 | 7m | 10 mg/kg (IV bolus) | Single |
| | 8f | 10 mg/kg (IV bolus) | Single |
| Ibandronate | 9m | 0.15 mg/kg (IV bolus) | Repeated (monthly) |
| | 10f | 0.15 mg/kg (IV bolus) | Repeated (monthly) |

TABLE C-11
Values obtained for the pharmacokinetic parameters in
the Cynomolgus Monkeys study as described in Example 7.

| Parameter¹ | cyno 1m | cyno 2f | cyno 5m | cyno 6f |
|---|---|---|---|---|
| Vₛₛ_{_{—}}_{pred} (mL/kg) | 67.7 | 71.1 | 67.1 | 55.4 |
| CL_{_{—}}_{pred} (mL/day/kg) | 7.71 | 7.91 | 5.86 | 5.08 |
| MRT_{inf}_{_{—}}_{pred} (day) | 8.79 | 8.98 | 11.5 | 10.9 |
| t_{1/2 λz1} (day)² | 6.75 | 6.81 | 8.74 | 9.28 |
| λ_{z1}_{_{—}}_{lower}-λ_{z1}_{_{—}}ᵤₚₚₑᵣ (day) | 1-39 | 2-51 | 4-51 | 1-32 |
| R² t_{1/2 λz1} | 0.992 | 0.998 | 0.993 | 0.982 |
| t_{1/2 λz2} (day)³ | 3.10 | 3.29 | 2.53 | 2.21 |
| λ_{z2}_{_{—}}_{lower}-λ_{z2}_{_{—}}ᵤₚₚₑᵣ (day) | 39-58 | 51-72 | 58-72 | 36-51 |
| R² t_{1/2 λz2} | 0.994 | 0.985 | 0.991 | 0.984 |
| AUC_{0-39 days} | 1287 | — | 1693 | — |
| AUC_{0-51 days} | — | 1260 | — | 1909 |
| AUCₗₐₛₜ (μg · day/mL) | 1297 | 1264 | 1707 | 1970 |
| % AUCₑₓₜᵣₐₚ_{_{—}}_{pred} | 0.0117 | 0.0033 | 0.0046 | 0.0112 |
| AUC_{inf}_{_{—}}_{pred} (μg · day/mL) | 1297 | 1264 | 1708 | 1970 |
| AUC_{inf}_{_{—}}_{pred}/D (kg · day/mL) | 0.130 | 0.126 | 0.171 | 0.197 |

¹All parameters were calculated with non-compartmental modelling.
²Half-life calculated on apparent beta phase.
³Half-life calculated on apparent gamma phase.

TABLE C-12
Values obtained for the pharmacokinetic parameters in
the Cynomolgus Monkeys study as described in Example 7.

| Parameter¹ | cyno 3m | cyno 4f |
|---|---|---|
| Vₛₛ_{_{—}}_{pred} (mL/kg) | 488 | 775 |
| CL_{_{—}}_{pred} (mL/day/kg) | 2433 | 3355 |
| MRT_{inf}_{_{—}}_{pred} (day) | 0.200 | 0.231 |
| t_{1/2 λz} (day) | 0.787 | 0.843 |
| λ_{z1}_{_{—}}_{lower}-λ_{z1}_{_{—}}ᵤₚₚₑᵣ (day) | 1.0-4.0 | 1.0-4.0 |
| R² t_{1/2 λz} | 0.970 | 0.918 |
| AUCₗₐₛₜ (μg · day/mL) | 6.14 | 4.45 |
| % AUCₑₓₜᵣₐₚ_{_{—}}_{pred} | 0.380 | 0.493 |
| AUC_{inf}_{_{—}}_{pred} (μg · day/mL) | 6.16 | 4.47 |
| AUC_{inf}_{_{—}}_{pred}/D (kg · day/mL) | 0.0004 | 0.0003 |

¹All parameters calculated with non-compartmental modelling

TABLE C-13
Activity of the humanized RANKL Nanobodies
in AlphaScreen and Biacore 3000.

| | AlphaScreen | Biacore | | |
|---|---|---|---|---|
| Nanobody | IC50 (pM) | Kd (s−1) | Ka (M−1s−1) | KD (M) |
| RANKL13 | 174 | 2.50E−04 | 5.00E+05 | 5.00E−10 |
| RANKL13basic | 159 | 1.89E−04 | 8.85E+05 | 2.14E−10 |
| RANKL13hum1 | 123 | 1.45E−04 | 1.37E+06 | 1.06E−10 |
| RANKL13hum2 | 191 | 2.32E−04 | 2.64E+05 | 8.80E−10 |
| RANKL13hum3 | 196 | 1.74E−04 | 6.59E+05 | 2.64E−10 |
| RANKL13hum4 | 223 | 2.04E−04 | 3.79E+05 | 5.38E−10 |
| RANKL13hum5 | 91 | 2.10E−04 | 8.00E+05 | 2.60E−10 |
| RANKL18 | 292 | 5.60E−05 | 3.10E+05 | 1.80E−10 |
| RANKL18basic | 219 | 1.00E−04 | 6.12E+05 | 1.63E−10 |
| RANKL18hum1 | 3153 | 2.36E−04 | 1.51E+05 | 1.56E−09 |
| RANKL18hum2 | 3186 | 1.73E−04 | 6.34E+04 | 2.73E−09 |
| RANKL18hum3 | 274 | 1.27E−04 | 4.41E+05 | 2.88E−10 |
| RANKL18hum4 | ND | ND | ND | ND |
| RANKL18hum5 | 253 | 9.94E−05 | 4.29E+05 | 2.32E−10 |
| RANKL18hum6 | 138 | 6.72E−05 | 5.00E+05 | 1.60E−10 |
| RANKL18hum7 | 572 | 2.70E−04 | 1.80E−05 | 1.50E−09 |

TABLE C-14
Activity of different Nanobody constructs
in AlphaScreen and FMAT.

| | AlphaScreen | FMAT |
|---|---|---|
| Nanobody | IC50(pM) | IC50(pM) |
| RANKL13 | 120 | 264 |
| RANKL130 | 31 | 45 |
| RANKL131 | 19 | 23 |
| RANKL133 | 26 | ND |
| RANKL18 | 253 | 253 |
| RANKL180 | 39 | 56 |
| RANKL181biv | 113 | 134 |
| RANKL182biv | 89 | 76 |
| RANKL183biv | 49 | 52 |
| RANKL18hum6Bi_25 | 100 | 38 |
| RANKL18hum6Bi_30 | 50 | 38 |
| RANKL9 | 238 | 130 |
| RANKL90 | 63 | 49 |
| RANKL91biv | 153 | 90 |
| RANKL92biv | 70 | 32 |
| RANKL93biv | 66 | 48 |
| RANKL94biv | 72 | 30 |

TABLE C-15
Different construct made of the humanized Nanobodies.

| | Nanobody | SEQ |
|---|---|---|
| Nanobody format | ID | ID NO |
| RANKL13hum5-ALB012-RANKL13hum5 | RANKL008a | 759 |
| RANKL18hum6-ALB012-RANKL18hum6 | RANKL010a | 760 |
| RANKL13hum5-9GS-RANKL13hum5-PEG | RANKL001p | 761 |
| RANKL18hum6-30GS-RANKL18hum6-PEG | RANKL003p | 762 |
| RANKL13hum5-9GS-RANKL13hum5-HSA | RANKL004h | 772 |
| RANKL18hum6-30GS-RANKL18hum6-HSA | RANKL006h | 773 |

TABLE C-16
Activity of the different constructs of the
humanized Nanobodies in AlphaScreen and FMAT.

| | AlphaScreen | FMAT |
|---|---|---|
| Nanobody | IC50 (pM) | IC50 (pM) |
| RANKL13hum5 | 188 | 137 |
| RANKL008a | 25 | 36 |
| RANKL001p | 49 | 41 |
| RANKL004h | 48 | 34 |
| RANKL130 | 17 | 42 |
| RANKL18hum6 | 87 | 380 |
| RANKL3p | 25 | 38 |
| RANKL10a | 28 | 57 |
| RANKL180 | 30 | NA |

TABLE C-17
Basic pharmacokinetic parameters of Nanobodies after a single intravenous
administration (100 μg/animal) in the male Balb/c mouse.

| | RANKL008a | | | RANKL010a | | | RANKL001p | | | RANKL003p | | |
|---|---|---|---|---|---|---|---|---|---|---|---|---|
| Parameter | Mean | SD | CV(%) | Mean | SD | CV(%) | Mean | SD | CV(%) | Mean | SD | CV(%) |
| C(0) (g/ml) | 87.2 | 8.2 | 9 | 80.8 | 25.5 | 32 | — | — | — | 122 | 61 | 50 |
| Vss (mL) | 2.03 | 0.05 | 2 | 2.73 | 0.72 | 26 | — | — | — | 1.32 | 0.61 | 46 |
| Vc (mL) | 1.16 | 0.11 | 9 | 1.35 | 0.52 | 39 | — | — | — | 1.08 | 0.77 | 71 |
| Vt (mL) | 0.870 | 0.158 | 18 | 1.38 | 0.21 | 15 | — | — | — | 0.250 | 0.159 | 64 |
| CL (mL/day) | 1.15 | 0.08 | 7 | 1.36 | 0.40 | 29 | — | — | — | 0.629 | 0.263 | 42 |
| CLd (mL/day) | 2.06 | 0.18 | 9 | 5.12 | 0.95 | 19 | — | — | — | 1.09 | 0.41 | 38 |
| t½alpha (hr) | 3.55 | 0.35 | 10 | 2.06 | 0.48 | 23 | — | — | — | 2.99 | 2.41 | 81 |
| t½beta (day) | 1.37 | 0.01 | 1 | 1.50 | 0.09 | 6 | — | — | — | 1.53 | 0.07 | 4 |
| MRT (day) | 1.77 | 0.08 | 4 | 2.02 | 0.10 | 5 | — | — | — | 2.08 | 0.09 | 4 |
| AUCinf (g″day/ml) | 87.4 | 6.2 | 7 | 77.1 | 19.1 | 25 | — | — | — | 176 | 60 | 34 |
| AUCinf/D (day/ml) | 0.874 | 0.062 | 7 | 0.771 | 0.191 | 25 | — | — | — | 1.76 | 0.60 | 34 |

TABLE C-18
Basic pharmacokinetic parameters of Nanobodies after a single subcutaneous
administration (100 μg/animal) in the male Balb/c mouse.

| | RANKL008a | | | RANKL010a | | | RANKL001p | | | RANKL003p | | |
|---|---|---|---|---|---|---|---|---|---|---|---|---|
| Parameter | Mean | SD | CV(%) | Mean | SD | CV(%) | Mean | SD | CV(%) | Mean | SD | CV(%) |
| V/F (mL) | 2.59 | 0.34 | 13 | 2.39 | 0.10 | 4 | 4.53 | 4.68 | 103 | 1.01 | 0.29 | 29 |
| CL/F (mL/hr) | 1.41 | 0.19 | 13 | 1.12 | 0.01 | 1 | 1.93 | 2.03 | 105 | 0.447 | 0.109 | 24 |
| tlag (min) | — | | — | — | | — | 81.9 | 68.5 | 83 | — | | — |
| t½ absorption (hr) | 20.4 | 6.8 | 33 | 13.6 | 0.4 | 3 | 7.8 | 1.5 | 19 | 12.2 | 2.8 | 23 |
| t½ elimination (day) | 1.27 | 0.04 | 3 | 1.49 | 0.06 | 4 | 1.65 | 0.04 | 2 | 1.55 | 0.08 | 5 |
| tmax (day) | 1.47 | 0.24 | 16 | 1.27 | 0.04 | 3 | 1.00 | 0.09 | 9 | 1.21 | 0.14 | 12 |
| Cmax (μg/ml) | 17.5 | 1.5 | 9 | 23.1 | 0.7 | 3 | 27.1 | 18.0 | 66 | 60.6 | 14.3 | 24 |
| AUCinf (μg · hr/ml) | 72.0 | 9.4 | 13 | 89.7 | 0.9 | 1 | 95.8 | 62.8 | 66 | 233 | 59 | 25 |
| AUCinf/D (hr/ml) | 0.720 | 0.094 | 13 | 0.897 | 0.009 | 1 | 0.958 | 0.628 | 66 | 2.33 | 0.59 | 25 |
| F (%) | 82.4 | | | 102 | | | — | | | 110-133 | | |

TABLE C-19
Dose, route and frequency of administration used
in animal model as described in Example 14.

| | | | Route/frequency | Animal |
|---|---|---|---|---|
| Group | Test Item | Dose Level | admin. | numbers |
| 1 | RANKL008a | 3.0 | IV/Once | 1-3 |
| 2 | RANKL008a | 0.3 | IV/Once | 4-6 |
| 3 | RANKL008a | 0.03 | IV/Once | 7-9 |
| 4 | RANKL008a | 3.0 | SC/Once | 10-12 |
| 5 | RANKL001p | 3.0 | IV/Once | 13-15 |
| 6 | RANKL001p | 0.3 | IV/Once | 16-18 |
| 7 | RANKL001p | 0.03 | IV/Once | 19-21 |
| 8 | RANKL001p | 3.0 | SC/Once | 22-24 |
| 9 | RANKL003p | 3.0 | IV/Once | 25-27 |
| 10 | RANKL003p | 0.3 | IV/Once | 28-30 |
| 11 | RANKL003p | 0.03 | IV/Once | 31-33 |
| 12 | RANKL003p | 3.0 | SC/Once | 34-36 |
| 13 | RANKL130 | 10 | IV/Once | 37-39 |
| 14 | RANKL130 | 3.0 | IV/Once | 40-42 |
| 15 | Ibandronate | 0.15 | IV/Every Month | 43-45 |
| 16 | ALB8 | 3.0 | IV/Once | 46-48 |
| 17 | PBS | | IV/Once | 49-51 |

TABLE C-20
Basic pharmacokinetic parameters of RANKL008a after a single intravenous bolus
administration in the female cynomolgus monkey as described in Example 14.

| | 3 mg/kg | | 0.3 mg/kg | | 0.03 mg/kg | |
|---|---|---|---|---|---|---|
| parameter | Mean | SD | Mean | SD | Mean | SD |
| Vss_pred (mL/kg) | 65.8 | 4.3 | 74.2 | 12.8 | 85.3 | 7.9 |
| CL_pred (mL/day/kg) | 8.33 | 1.71 | 14.0 | 0.6 | 50.8 | 11.0 |
| MRTinf_pred (day) | 8.07 | 1.37 | 5.29 | 0.68 | 1.72 | 0.31 |
| t½ λz1 (day)¹ | 7.28 | 0.07 | 5.83 | 0.27 | — | — |
| λz1_lower (day) | — | — | — | — | — | — |
| λz1_upper (day) | — | — | — | — | — | — |
| R2 t½ λz1 | — | — | — | — | — | — |
| t½ λz2 (day)² | 1.65 | 1.42 | 1.28 | 0.58 | 1.18 | 0.20 |
| λz2_lower (day) | — | — | — | — | — | — |
| λz2_upper (day) | — | — | — | — | — | — |
| R2 t½ λz2 | — | — | — | — | — | — |
| AUClast (mg · day/ml) | 370 | 74 | 19.5 | 3.0 | 0.546 | 0.186 |
| % AUCextrap_pred | 0.0510 | 0.0584 | 2.10 | 3.26 | 11.7 | 14.2 |
| AUCinf_pred (mg · day/ml) | 370 | 74 | 20.0 | 3.4 | 0.609 | 0.140 |
| AUCinf_pred/D (kg · day/ml) | 0.124 | 0.025 | 0.0716 | 0.0034 | 0.0203 | 0.0047 |

¹Half-life calculated on apparent beta phase
²Half-life calculated on apparent gamma phase

TABLE C-21
Basic pharmacokinetic parameters of RANKL001p after a single intravenous bolus
administration in the female cynomolgus monkey as described in Example 14.

| | 3 mg/kg | | 0.3 mg/kg | | 0.03 mg/kg | |
|---|---|---|---|---|---|---|
| parameter | Mean | SD | Mean | SD | Mean | SD |
| Vss_pred (mL/kg) | 60.4 | 4.6 | 73.3 | 4.3 | 67.5 | 0.9 |
| CL_pred (mL/day/kg) | 8.69 | 0.82 | 15.0 | 1.5 | 41.3 | 4.5 |
| MRTinf_pred (day) | 6.95 | 0.13 | 4.90 | 0.51 | 1.64 | 0.18 |
| t½ λz1 (day)¹ | 5.14 | 0.15 | 4.11 | 0.44 | — | — |
| λz1_lower (day) | — | — | — | — | — | — |
| λz1_upper (day) | — | — | — | — | — | — |
| R2 t½ λz1 | — | — | — | — | — | — |
| t½ λz2 (day)² | 1.28 | 0.63 | 1.95 | 0.39 | 1.11 | 0.09 |
| λz2_lower (day) | — | — | — | — | — | — |
| λz2_upper (day) | — | — | — | — | — | — |
| R2 t½ λz2 | — | — | — | — | — | — |
| AUClast (mg · day/ml) | 346 | 31 | 19.7 | 2.0 | 0.670 | 0.095 |
| % AUCextrap_pred | 0.0191 | 0.0072 | 1.65 | 1.18 | 3.95 | 1.97 |
| AUCinf_pred (mg · day/ml) | 346 | 31 | 20.0 | 1.9 | 0.697 | 0.092 |
| AUCinf_pred/D (kg · day/ml) | 0.115 | 0.010 | 0.0669 | 0.0065 | 0.0244 | 0.0026 |

¹Half-life calculated on apparent beta phase
²Half-life calculated on apparent gamma phase

TABLE C-22
Basic pharmacokinetic parameters of RANKL003p after a single intravenous bolus
administration in the female cynomolgus monkey as described in Example 14.

| | 3 mg/kg | | 0.3 mg/kg | | 0.03 mg/kg | |
|---|---|---|---|---|---|---|
| parameter | Mean | SD | Mean | SD | Mean | SD |
| Vss_pred (mL/kg) | 33.1 | 1.8 | 31.1 | 3.9 | 32.5 | 5.9 |
| CL_pred (mL/day/kg) | 4.49 | 0.04 | 5.93 | 0.60 | 14.9 | 2.9 |
| MRTinf_pred (day) | 7.38 | 0.34 | 5.25 | 0.50 | 2.21 | 0.37 |
| t½ λz1 (day)¹ | 5.75 | 1.10 | 4.57 | 0.24 | — | — |
| λz1_lower (day) | — | — | — | — | — | — |
| λz1_upper (day) | — | — | — | — | — | — |
| R2 t½ λz1 | — | — | — | — | — | — |
| t½ λz2 (day)² | 1.39 | 0.12 | 2.06 | 0.37 | 1.52 | 0.24 |
| λz2_lower (day) | — | — | — | — | — | — |
| λz2_upper (day) | — | — | — | — | — | — |
| R2 t½ λz2 | — | — | — | — | — | — |
| AUClast (mg · day/ml) | 647 | 32 | 50.2 | 4.9 | 1.88 | 0.42 |
| % AUCextrap_pred | 3.21 | 5.50 | 1.37 | 0.19 | 9.19 | 2.03 |
| AUCinf_pred (mg · day/ml) | 669 | 5 | 50.9 | 4.9 | 2.06 | 0.42 |
| AUCinf_pred/D (kg · day/ml) | 0.223 | 0.002 | 0.170 | 0.016 | 0.0688 | 0.0140 |

¹Half-life calculated on apparent beta phase
²Half-life calculated on apparent gamma phase

TABLE C-23
Basic pharmacokinetic parameters of Nanobodies after subcutaneous administration
in the female cynomolgus monkeys as described in Example 14.

| | RANKL008a | | RANKL001p | | RANKL003p | |
|---|---|---|---|---|---|---|
| parameter | Mean | SD | Mean | SD | Mean | SD |
| Vss/F (mL/g)¹ | 109 | 11 | 100 | 8 | 46.1 | 12.4 |
| CL/F_pred (mL/day/kg) | 7.93 | 0.70 | 11.7 | 0.2 | 6.66 | 0.65 |
| MRTinf_pred (day)¹ | 13.8 | 2.4 | 8.56 | 0.78 | 7.08 | 2.66 |
| t½ λz1 (day)² | 10.9 | 2.1 | 5.81 | 0.28 | 5.25 | 0.23 |
| λz1_lower (day) | — | — | — | — | — | — |
| λz1_upper (day) | — | — | — | — | — | — |
| R2 t½ λz1 | — | — | — | — | — | — |
| t½ λz2 (day)³ | 2.07 | 0.99 | 1.86 | 0.28 | 1.03 | 0.37 |
| λz2_lower (day) | — | — | — | — | — | — |
| λz2_upper (day) | — | — | — | — | — | — |
| R2 t½ λz2 | — | — | — | — | — | — |
| AUClast (mg · day/ml) | 380 | 32 | 256 | 4 | 452 | 48 |
| % AUCextrap_pred | 0.005 | 0.002 | 0.104 | 0.074 | 0.382 | 0.562 |
| AUCinf_pred (mg · day/ml) | 380 | 32 | 256 | 3 | 453 | 46.7 |
| tmax (day) | 2.00 | 0.00 | 2.00 | 0.00 | 3.00 | 2.65 |
| Cmax (μg/ml) | 21.8 | 1.7 | 24.6 | 0.5 | 46.2 | 11.0 |
| AUCinf_pred/D (kg · day/ml) | 0.127 | 0.011 | 0.085 | 0.001 | 0.151 | 0.016 |
| F (%) | 103%⁴ | | 74.0%⁴ | | 67.7%⁴ | |

¹MRT calculated as AUMC/AUC and therefore not corrected for MAT. Vss/F = MRT•CL
²Half-life calculated on apparent b phase
³Half-life calculated on apparent g phase
⁴Estimation of F on the 3 mg/kg dose level ignoring immunogenity and non-linearity in CL

TABLE C-24
Pharmacodynamic parameters (±SE) of RANK008a,
RANKL001p and RANKL003p in the female cynomolgus
monkey as described in Example 14.

| Parameter | RANKL008a | RANKL001p | RANKL003p |
|---|---|---|---|
| Kᵢₙ (nM/day) | 938 ± 194 | 1201 ± 235 | 2835 ± 2758¹ |
| Kₒᵤₜ (1/day) | 8.99 ± 1.79 | 11.7 ± 2.1 | 25.9 ± 19.8¹ |
| Iₘₐₓ | 0.878 ± 0.024 | 0.882 ± 0.017 | 0.892 ± 0.038 |
| IC₅₀ (μg/mL) | 0.049 ± 0.008 | 0.114 ± 0.025 | 0.518 ± 0.125 |
| n | 1.38 ± 0.29 | 1.23 ± 0.21 | 0.817 ± 0.182 |

¹Values could not be estimated with sufficient precision

TABLE C-25
Main pharmacokinetic parameters (mean +/− SD; n = 3) of
RANKL008a and αOPGL-1 following an single i.v. bolus administration
with RANKL008a at 0.3 mg/kg or αOPGL-1 at 1 mg/kg in the female
Cynomolgus monkey.

| Compound | RANKL008a | αOPGL-1 |
|---|---|---|
| Dose (mg/kg) | 0.3 mg/kg | 1 mg/kg |
| Route | IV | IV |
| N | n = 3 | n = 2 |
| C0 (ug/ml) | 3.47 | 14.7 |
| AUCinf (ug · d/ml) | 22.8 | 94.5 |
| t½ (d) | 8 | 6.5 |
| Cl (ml/d/kg) | 13.2 | 10.6 |
| Vss (ml/kg) | 77.1 | 72.8 |

TABLE C-26
Main average pharmacodynamic parameters (mean) of RANKL008a
and αOPGL-1 following a single s.c. administration at
0.3 mg/kg (RANKL008a) or 1 mg/kg (αOPGL-1), respectively
in the female Cynomolgus monkey.

| Compound | RANKL008a | αOPGL-1 |
|---|---|---|
| Dose (mg/kg) | 0.3 | 1 |
| Route | IV | IV |
| N | 3 | 2 |
| Tmin (d) | 8 | 11 |
| Rmin (%) | 9 | 14 |
| AUC below T (%*d) | 289 | 212 |
| Time below T (d) | 19 | 17.1 |
| T onset (d) | 0.143 | 0.125 |
| T offset (d) | 19.2 | 17.2 |

[1466] The terms and expressions which have been employed are used as terms of description and not of limitation, and there is no intention in the use of such terms and expressions of excluding any equivalents of the features shown and described or portions thereof, it being recognized that various modifications are possible within the scope of the invention.

[1467] All references disclosed herein are incorporated by reference, in particular for the teaching that is referenced hereinabove.

The application's sequence listing, which the Patent Office published only in electronic form, follows.

SEQUENCE LISTING (816 sequences)

SEQ ID NO: 1 - protein, 102 aa, Artificial
  KERE-class Nanobody
  misc_feature (31)..(35): CDR
  misc_feature (50)..(54): CDR
  misc_feature (87)..(91): CDR
EVQLVESGGGLVQPGGSLRLSCAASGIPFSXXXXXWFRQAPGKQRDSVAXXXXXRFTISRDNAKNTVYLQMNSLKPEDTAVYRCYFXXXXXWGQGTQVTVSS

SEQ ID NO: 2 - protein, 102 aa, Artificial
  KERE-class Nanobody
  misc_feature (31)..(35): CDR
  misc_feature (50)..(54): CDR
  misc_feature (87)..(91): CDR
QVKLEESGGGLVQAGGSLRLSCVGSGRTFSXXXXXWFRLAPGKEREFVAXXXXXRFTISRDTASNRGYLHMNNLTPEDTAVYYCAAXXXXXWGQGTQVTVSS

SEQ ID NO: 3 - protein, 102 aa, Artificial
  KERE-class Nanobody
  misc_feature (31)..(35): CDR
  misc_feature (50)..(54): CDR
  misc_feature (87)..(91): CDR
AVQLVDSGGGLVQAGDSLKLSCALTGGAFTXXXXXWFRQTPGREREFVAXXXXXRFTISRDNAKNMVYLRMNSLIPEDAAVYSCAAXXXXXWGQGTLVTVSS

SEQ ID NO: 4 - protein, 102 aa, Artificial
  KERE-class Nanobody
  misc_feature (31)..(35): CDR
  misc_feature (50)..(54): CDR
  misc_feature (87)..(91): CDR
QVQLVESGGGLVEAGGSLRLSCTASESPFRXXXXXWFRQTSGQEREFVAXXXXXRFTISRDDAKNTVWLHGSTLKPEDTAVYYCAAXXXXXWGQGTQVTVSS

SEQ ID NO: 5 - protein, 102 aa, Artificial
  KERE-class Nanobody
  misc_feature (31)..(35): CDR
  misc_feature (50)..(54): CDR
  misc_feature (87)..(91): CDR
AVQLVESGGGLVQGGGSLRLACAASERIFDXXXXXWYRQGPGNERELVAXXXXXRFTISMDYTKQTVYLHMNSLRPEDTGLYYCKIXXXXXWGQGTQVTVSS

SEQ ID NO: 6 - protein, 102 aa, Artificial
  KERE-class Nanobody
  misc_feature (31)..(35): CDR
  misc_feature (50)..(54): CDR
  misc_feature (87)..(91): CDR
DVKFVESGGGLVQAGGSLRLSCVASGFNFDXXXXXWFRQAPGKEREEVAXXXXXRFTISSEKDKNSVYLQMNSLKPEDTALYICAGXXXXXWGRGTQVTVSS

SEQ ID NO: 7 - protein, 102 aa, Artificial
  KERE-class Nanobody
  misc_feature (31)..(35): CDR
  misc_feature (50)..(54): CDR
  misc_feature (87)..(91): CDR
QVRLAESGGGLVQSGGSLRLSCVASGSTYTXXXXXWYRQYPGKQRALVAXXXXXRFTIARDSTKDTFCLQMNNLKPEDTAVYYCYAXXXXXWGQGTQVTVSS

SEQ ID NO: 8 - protein, 102 aa, Artificial
  KERE-class Nanobody
  misc_feature (31)..(35): CDR
  misc_feature (50)..(54): CDR
  misc_feature (87)..(91): CDR
EVQLVESGGGLVQAGGSLRLSCAASGFTSDXXXXXWFRQAPGKPREGVSXXXXXRFTISTDNAKNTVHLLMNRVNAEDTALYYCAVXXXXXWGRGTRVTVSS

SEQ ID NO: 9 - protein, 102 aa, Artificial
  KERE-class Nanobody
  misc_feature (31)..(35): CDR
  misc_feature (50)..(54): CDR
  misc_feature (87)..(91): CDR
QVQLVESGGGLVQPGGSLRLSCQASGDISTXXXXXWYRQVPGKLREFVAXXXXXRFTISGDNAKRAIYLQMNNLKPDDTAVYYCNRXXXXXWGQGTQVTVSP

SEQ ID NO: 10 - protein, 102 aa, Artificial
  KERE-class Nanobody
  misc_feature (31)..(35): CDR
  misc_feature (50)..(54): CDR
  misc_feature (87)..(91): CDR
QVPVVESGGGLVQAGDSLRLFCAVPSFTSTXXXXXWFRQAPGKEREFVAXXXXXRFTISRNATKNTLTLRMDSLKPEDTAVYYCAAXXXXXWGQGTQVTVSS

SEQ ID NO: 11 - protein, 102 aa, Artificial
  KERE-class Nanobody
  misc_feature (31)..(35): CDR
  misc_feature (50)..(54): CDR
  misc_feature (87)..(91): CDR
EVQLVESGGGLVQAGDSLRLFCTVSGGTASXXXXXWFRQAPGEKREFVAXXXXXRFTIARENAGNMVYLQMNNLKPDDTALYTCAAXXXXXWGRGTQVTVSS

SEQ ID NO: 12 - protein, 102 aa, Artificial
  KERE-class Nanobody
  misc_feature (31)..(35): CDR
  misc_feature (50)..(54): CDR
  misc_feature (87)..(91): CDR
AVQLVESGGDSVQPGDSQTLSCAASGRTNSXXXXXWFRQAPGKERVFLAXXXXXRFTISRDSAKNMMYLQMNNLKPQDTAVYYCAAXXXXXWGQGTQVTVSS

SEQ ID NO: 13 - protein, 102 aa, Artificial
  KERE-class Nanobody
  misc_feature (31)..(35): CDR
  misc_feature (50)..(54): CDR
  misc_feature (87)..(91): CDR
AVQLVESGGGLVQAGGSLRLSCVVSGLTSSXXXXXWFRQTPWQERDFVAXXXXXRFTISRDNYKDTVLLEMNFLKPEDTAIYYCAAXXXXXWGQGTQVTVSS

SEQ ID NO: 14 - protein, 102 aa, Artificial
  KERE-class Nanobody
  misc_feature (31)..(35): CDR
  misc_feature (50)..(54): CDR
  misc_feature (87)..(91): CDR
AVQLVESGGGLVQAGASLRLSCATSTRTLDXXXXXWFRQAPGRDREFVAXXXXXRFTVSRDSAENTVALQMNSLKPEDTAVYYCAAXXXXXWGQGTRVTVSS

SEQ ID NO: 15 - protein, 102 aa, Artificial
  KERE-class Nanobody
  misc_feature (31)..(35): CDR
  misc_feature (50)..(54): CDR
  misc_feature (87)..(91): CDR
QVQLVESGGGLVQPGGSLRLSCTVSRLTAHXXXXXWFRQAPGKEREAVSXXXXXRFTISRDYAGNTAFLQMDSLKPEDTGVYYCATXXXXXWGQGTQVTVSS

SEQ ID NO: 16 - protein, 102 aa, Artificial
  KERE-class Nanobody
  misc_feature (31)..(35): CDR
  misc_feature (50)..(54): CDR
  misc_feature (87)..(91): CDR
EVQLVESGGELVQAGGSLKLSCTASGRNFVXXXXXWFRRAPGKEREFVAXXXXXRFTVSRDNGKNTAYLRMNSLKPEDTADYYCAVXXXXXLGSGTQVTVSS

SEQ ID NO: 17 - protein, 102 aa, Artificial
  GLEW-class Nanobody
  misc_feature (31)..(35): CDR
  misc_feature (50)..(54): CDR
  misc_feature (87)..(91): CDR
AVQLVESGGGLVQPGGSLRLSCAASGFTFSXXXXXWVRQAPGKVLEWVSXXXXXRFTISRDNAKNTLYLQMNSLKPEDTAVYYCVKXXXXXGSQGTQVTVSS

SEQ ID NO: 18 - protein, 102 aa, Artificial
  GLEW-class Nanobody
  misc_feature (31)..(35): CDR
  misc_feature (50)..(54): CDR
  misc_feature (87)..(91): CDR
EVQLVESGGGLVQPGGSLRLSCVCVSSGCTXXXXXWVRQAPGKAEEWVSXXXXXRFKISRDNAKKTLYLQMNSLGPEDTAMYYCQRXXXXXRGQGTQVTVSS

SEQ ID NO: 19 - protein, 102 aa, Artificial
  GLEW-class Nanobody
  misc_feature (31)..(35): CDR
  misc_feature (50)..(54): CDR
  misc_feature (87)..(91): CDR
EVQLVESGGGLALPGGSLTLSCVFSGSTFSXXXXXWVRHTPGKAEEWVSXXXXXRFTISRDNAKNTLYLEMNSLSPEDTAMYYCGRXXXXXRSKGIQVTVSS

SEQ ID NO: 20 - protein, 102 aa, Artificial
  P,R,S 103-class Nanobody
  misc_feature (31)..(35): CDR
  misc_feature (50)..(54): CDR
  misc_feature (87)..(91): CDR
AVQLVESGGGLVQAGGSLRLSCAASGRTFSXXXXXWFRQAPGKEREFVAXXXXXRFTISRDNAKNTVYLQMNSLKPEDTAVYYCAAXXXXXRGQGTQVTVSS

SEQ ID NO: 21 - protein, 102 aa, Artificial
  P,R,S 103-class Nanobody
  misc_feature (31)..(35): CDR
  misc_feature (50)..(54): CDR
  misc_feature (87)..(91): CDR
DVQLVESGGDLVQPGGSLRLSCAASGFSFDXXXXXWLRQTPGKGLEWVGXXXXXRFTISRDNAKNMLYLHLNNLKSEDTAVYYCRRXXXXXLGQGTQVTVSS

SEQ ID NO: 22 - protein, 102 aa, Artificial; identical to SEQ ID NO: 18
  P,R,S 103-class Nanobody
  misc_feature (31)..(35): CDR
  misc_feature (50)..(54): CDR
  misc_feature (87)..(91): CDR

SEQ ID NO: 23 - protein, 30 aa, Artificial
  KERE-class Nanobody FW1 sequence
QVQRVESGGGLVQAGGSLRLSCAASGRTSS

SEQ ID NO: 24 - protein, 30 aa, Artificial
  KERE-class Nanobody FW1 sequence
QVQLVESGGGLVQTGDSLSLSCSASGRTFS

SEQ ID NO: 25 - protein, 30 aa, Artificial
  KERE-class Nanobody FW1 sequence
QVKLEESGGGLVQAGDSLRLSCAATGRAFG

SEQ ID NO: 26 - protein, 30 aa, Artificial
  KERE-class Nanobody FW1 sequence
AVQLVESGGGLVQPGESLGLSCVASGRDFV

SEQ ID NO: 27 - protein, 30 aa, Artificial
  KERE-class Nanobody FW1 sequence
EVQLVESGGGLVQAGGSLRLSCEVLGRTAG

SEQ ID NO: 28 - protein, 30 aa, Artificial
  KERE-class Nanobody FW1 sequence
QVQLVESGGGWVQPGGSLRLSCAASETILS

SEQ ID NO: 29 - protein, 30 aa, Artificial
  KERE-class Nanobody FW1 sequence
QVQLVESGGGTVQPGGSLNLSCVASGNTFN

SEQ ID NO: 30 - protein, 30 aa, Artificial
  KERE-class Nanobody FW1 sequence
EVQLVESGGGLAQPGGSLQLSCSAPGFTLD

SEQ ID NO: 31 - protein, 30 aa, Artificial
  KERE-class Nanobody FW1 sequence
AQELEESGGGLVQAGGSLRLSCAASGRTFN

SEQ ID NO: 32 - protein, 22 aa, Artificial
  KERE-class Nanobody FW1 sequence
VESGGGLVQPGGSLRLSCAASG

SEQ ID NO: 33 - protein, 22 aa, Artificial
  KERE-class Nanobody FW1 sequence
VDSGGGLVQAGDSLKLSCALTG

SEQ ID NO: 34 - protein, 22 aa, Artificial
  KERE-class Nanobody FW1 sequence
VDSGGGLVQAGDSLRLSCAASG

SEQ ID NO: 35 - protein, 22 aa, Artificial
  KERE-class Nanobody FW1 sequence
VDSGGGLVEAGGSLRLSCQVSE

SEQ ID NO: 36 - protein, 22 aa, Artificial
  KERE-class Nanobody FW1 sequence
QDSGGGSVQAGGSLKLSCAASG

SEQ ID NO: 37 - protein, 22 aa, Artificial
  KERE-class Nanobody FW1 sequence
VQSGGRLVQAGDSLRLSCAASE

SEQ ID NO: 38 - protein, 22 aa, Artificial
  KERE-class Nanobody FW1 sequence
VESGGTLVQSGDSLKLSCASST

SEQ ID NO: 39 - protein, 22 aa, Artificial
  KERE-class Nanobody FW1 sequence
MESGGDSVQSGGSLTLSCVASG

SEQ ID NO: 40 - protein, 22 aa, Artificial
  KERE-class Nanobody FW1 sequence
QASGGGLVQAGGSLRLSCSASV

SEQ ID NO: 41 - protein, 14 aa, Artificial
  KERE-class Nanobody FW2 sequence
WFRQAPGKEREFVA

SEQ ID NO: 42 - protein, 14 aa, Artificial
  KERE-class Nanobody FW2 sequence
WFRQTPGREREFVA

SEQ ID NO: 43 - protein, 14 aa, Artificial
  KERE-class Nanobody FW2 sequence
WYRQAPGKQREMVA

SEQ ID NO: 44 - protein, 14 aa, Artificial
  KERE-class Nanobody FW2 sequence
WYRQGPGKQRELVA

SEQ ID NO: 45 - protein, 14 aa, Artificial
  KERE-class Nanobody FW2 sequence
WIRQAPGKEREGVS

SEQ ID NO: 46 - protein, 14 aa, Artificial
  KERE-class Nanobody FW2 sequence
WFREAPGKEREGIS

SEQ ID NO: 47 - protein, 14 aa, Artificial
  KERE-class Nanobody FW2 sequence
WYRQAPGKERDLVA

SEQ ID NO: 48 - protein, 14 aa, Artificial
  KERE-class Nanobody FW2 sequence
WFRQAPGKQREEVS

SEQ ID NO: 49 - protein, 14 aa, Artificial
  KERE-class Nanobody FW2 sequence
WFRQPPGKVREFVG

SEQ ID NO: 50 - protein, 32 aa, Artificial
  KERE-class Nanobody FW3 sequence
RFTISRDNAKNTVYLQMNSLKPEDTAVYRCYF

SEQ ID NO: 51 - protein, 32 aa, Artificial
  KERE-class Nanobody FW3 sequence
RFAISRDNNKNTGYLQMNSLEPEDTAVYYCAA

SEQ ID NO: 52 - protein, 32 aa, Artificial
  KERE-class Nanobody FW3 sequence
RFTVARNNAKNTVNLEMNSLKPEDTAVYYCAA

SEQ ID NO: 53 - protein, 32 aa, Artificial
  KERE-class Nanobody FW3 sequence
RFTISRDIAKNTVDLLMNNLEPEDTAVYYCAA

SEQ ID NO: 54 - protein, 32 aa, Artificial
  KERE-class Nanobody FW3 sequence
RLTISRDNAVDTMYLQMNSLKPEDTAVYYCAA

SEQ ID NO: 55 - protein, 32 aa, Artificial
  KERE-class Nanobody FW3 sequence
RFTISRDNAKNTVYLQMDNVKPEDTAIYYCAA

SEQ ID NO: 56 - protein, 32 aa, Artificial
  KERE-class Nanobody FW3 sequence
RFTISKDSGKNTVYLQMTSLKPEDTAVYYCAT

SEQ ID NO: 57 - protein, 32 aa, Artificial
  KERE-class Nanobody FW3 sequence
RFTISRDSAKNMMYLQMNNLKPQDTAVYYCAA

SEQ ID NO: 58 - protein, 32 aa, Artificial
  KERE-class Nanobody FW3 sequence
RFTISRENDKSTVYLQLNSLKPEDTAVYYCAA

SEQ ID NO: 59 - protein, 32 aa, Artificial
  KERE-class Nanobody FW3 sequence
RFTISRDYAGNTAYLQMNSLKPEDTGVYYCAT

SEQ ID NO: 60 - protein, 11 aa, Artificial
  KERE-class Nanobody FW4 sequence
WGQGTQVTVSS

SEQ ID NO: 61 - protein, 11 aa, Artificial
  KERE-class Nanobody FW4 sequence
WGKGTLVTVSS

SEQ ID NO: 62 - protein, 11 aa, Artificial
  KERE-class Nanobody FW4 sequence
RGQGTRVTVSS

SEQ ID NO: 63 - protein, 11 aa, Artificial
  KERE-class Nanobody FW4 sequence
WGLGTQVTISS

SEQ ID NO: 64 - protein, 30 aa, Artificial
  GLEW-class Nanobody FW1 sequence
QVQLVESGGGLVQPGGSLRLSCAASGFTFS

SEQ ID NO: 65 - protein, 30 aa, Artificial
  GLEW-class Nanobody FW1 sequence
EVHLVESGGGLVRPGGSLRLSCAAFGFIFK

SEQ ID NO: 66 - protein, 30 aa, Artificial
  GLEW-class Nanobody FW1 sequence
QVKLEESGGGLAQPGGSLRLSCVASGFTFS

SEQ ID NO: 67 - protein, 30 aa, Artificial
  GLEW-class Nanobody FW1 sequence
EVQLVESGGGLVQPGGSLRLSCVCVSSGCT

SEQ ID NO: 68 - protein, 30 aa, Artificial
  GLEW-class Nanobody FW1 sequence
EVQLVESGGGLALPGGSLTLSCVFSGSTFS

SEQ ID NO: 69 - protein, 22 aa, Artificial
  GLEW-class Nanobody FW1 sequence
VESGGGLVQPGGSLRLSCAASG

SEQ ID NO: 70 - protein, 22 aa, Artificial
  GLEW-class Nanobody FW1 sequence
EESGGGLAQPGGSLRLSCVASG

SEQ ID NO: 71 - protein, 22 aa, Artificial
  GLEW-class Nanobody FW1 sequence
VESGGGLALPGGSLTLSCVFSG

SEQ ID NO: 72 - protein, 14 aa, Artificial
  GLEW-class Nanobody FW2 sequence
WVRQAPGKVLEWVS

SEQ ID NO: 73 - protein, 14 aa, Artificial
  GLEW-class Nanobody FW2 sequence
WVRRPPGKGLEWVS

SEQ ID NO: 74 - protein, 14 aa, Artificial
  GLEW-class Nanobody FW2 sequence
WVRQAPGMGLEWVS

SEQ ID NO: 75 - protein, 14 aa, Artificial
  GLEW-class Nanobody FW2 sequence
WVRQAPGKEPEWVS

SEQ ID NO: 76 - protein, 14 aa, Artificial
  GLEW-class Nanobody FW2 sequence
WVRQAPGKDQEWVS

SEQ ID NO: 77 - protein, 14 aa, Artificial
  GLEW-class Nanobody FW2 sequence
WVRQAPGKAEEWVS

SEQ ID NO: 78 - protein, 14 aa, Artificial
  GLEW-class Nanobody FW2 sequence
WVRQAPGKGLEWVA

SEQ ID NO: 79 - protein, 14 aa, Artificial
  GLEW-class Nanobody FW2 sequence
WVRQAPGRATEWVS

SEQ ID NO: 80 - protein, 32 aa, Artificial
  GLEW-class Nanobody FW3 sequence
RFTISRDNAKNTLYLQMNSLKPEDTAVYYCVK

SEQ ID NO: 81 - protein, 32 aa, Artificial
  GLEW-class Nanobody FW3 sequence
RFTISRDNARNTLYLQMDSLIPEDTALYYCAR

SEQ ID NO: 82 - protein, 32 aa, Artificial
  GLEW-class Nanobody FW3 sequence
RFTSSRDNAKSTLYLQMNDLKPEDTALYYCAR

SEQ ID NO: 83 - protein, 32 aa, Artificial
  GLEW-class Nanobody FW3 sequence
RFIISRDNAKNTLYLQMNSLGPEDTAMYYCQR

SEQ ID NO: 84 - protein, 32 aa, Artificial
  GLEW-class Nanobody FW3 sequence
RFTASRDNAKNTLYLQMNSLKSEDTARYYCAR

SEQ ID NO: 85 - protein, 32 aa, Artificial
  GLEW-class Nanobody FW3 sequence
RFTISRDNAKNTLYLQMDDLQSEDTAMYYCGR

SEQ ID NO: 86 - protein, 11 aa, Artificial
  GLEW-class Nanobody FW4 sequence
GSQGTQVTVSS

SEQ ID NO: 87 - protein, 11 aa, Artificial
  GLEW-class Nanobody FW4 sequence
LRGGTQVTVSS

SEQ ID NO: 88 - protein, 11 aa, Artificial
  GLEW-class Nanobody FW4 sequence
RGQGTLVTVSS

SEQ ID NO: 89 - protein, 11 aa, Artificial
  GLEW-class Nanobody FW4 sequence
RSRGIQVTVSS

SEQ ID NO: 90 - protein, 11 aa, Artificial
  GLEW-class Nanobody FW4 sequence
WGKGTQVTVSS

SEQ ID NO: 91 - protein, 11 aa, Artificial
  GLEW-class Nanobody FW4 sequence
WGQGTQVTVSS

SEQ ID NO: 92 - protein, 30 aa, Artificial
  P,R,S 103-class Nanobody FW1 sequence
AVQLVESGGGLVQAGGSLRLSCAASGRTFS

SEQ ID NO: 93 - protein, 30 aa, Artificial
  P,R,S 103-class Nanobody FW1 sequence
QVQLQESGGGMVQPGGSLRLSCAASGFDFG

SEQ ID NO: 94 - protein, 30 aa, Artificial; identical to SEQ ID NO: 65
  P,R,S 103-class Nanobody FW1 sequence

SEQ ID NO: 95 - protein, 30 aa, Artificial
  P,R,S 103-class Nanobody FW1 sequence
QVQLAESGGGLVQPGGSLKLSCAASRTIVS

SEQ ID NO: 96 - protein, 30 aa, Artificial
  P,R,S 103-class Nanobody FW1 sequence
QEHLVESGGGLVDIGGSLRLSCAASERIFS

SEQ ID NO: 97 - protein, 30 aa, Artificial; identical to SEQ ID NO: 66
  P,R,S 103-class Nanobody FW1 sequence

SEQ ID NO: 98 - protein, 30 aa, Artificial; identical to SEQ ID NO: 67
  P,R,S 103-class Nanobody FW1 sequence

SEQ ID NO: 99 - protein, 30 aa, Artificial; identical to SEQ ID NO: 68
  P,R,S 103-class Nanobody FW1 sequence

SEQ ID NO: 100 - protein, 22 aa, Artificial
  P,R,S 103-class Nanobody FW1 sequence
VESGGGLVQAGGSLRLSCAASG

SEQ ID NO: 101 - protein, 22 aa, Artificial
  P,R,S 103-class Nanobody FW1 sequence
AESGGGLVQPGGSLKLSCAASR

SEQ ID NO: 102 - protein, 14 aa, Artificial
  P,R,S 103-class Nanobody FW2 sequence
WFRQAPGKEREFVA

SEQ ID NO: 103 - protein, 14 aa, Artificial
  P,R,S 103-class Nanobody FW2 sequence
WVRQAPGKVLEWVS

SEQ ID NO: 104 - protein, 14 aa, Artificial
  P,R,S 103-class Nanobody FW2 sequence
WVRRPPGKGLEWVS

SEQ ID NO: 105 - protein, 14 aa, Artificial
  P,R,S 103-class Nanobody FW2 sequence
WIRQAPGKEREGVS

SEQ ID NO: 106 - protein, 14 aa, Artificial
  P,R,S 103-class Nanobody FW2 sequence
WVRQYPGKEPEWVS

SEQ ID NO: 107 - protein, 14 aa, Artificial
  P,R,S 103-class Nanobody FW2 sequence
WFRQPPGKEHEFVA

SEQ ID NO: 108 - protein, 14 aa, Artificial
  P,R,S 103-class Nanobody FW2 sequence
WYRQAPGKRTELVA

SEQ ID NO: 109 - protein, 14 aa, Artificial
  P,R,S 103-class Nanobody FW2 sequence
WLRQAPGQGLEWVS

SEQ ID NO: 110 - protein, 14 aa, Artificial
  P,R,S 103-class Nanobody FW2 sequence
WLRQTPGKGLEWVG

SEQ ID NO: 111 - protein, 14 aa, Artificial
  P,R,S 103-class Nanobody FW2 sequence
WVRQAPGKAEEFVS

SEQ ID NO: 112 - protein, 32 aa, Artificial
  P,R,S 103-class Nanobody FW3 sequence
RFTISRDNAKNTVYLQMNSLKPEDTAVYYCAA

SEQ ID NO: 113 - protein, 32 aa, Artificial; identical to SEQ ID NO: 81
  P,R,S 103-class Nanobody FW3 sequence

SEQ ID NO: 114 - protein, 32 aa, Artificial
  P,R,S 103-class Nanobody FW3 sequence
RFTISRDNAKNEMYLQMNNLKTEDTGVYWCGA

SEQ ID NO: 115 - protein, 32 aa, Artificial
  P,R,S 103-class Nanobody FW3 sequence
RFTISSDSNRNMIYLQMNNLKPEDTAVYYCAA

SEQ ID NO: 116 - protein, 32 aa, Artificial
  P,R,S 103-class Nanobody FW3 sequence
RFTISRDNAKNMLYLHLNNLKSEDTAVYYCRR

SEQ ID NO: 117 - protein, 32 aa, Artificial
  P,R,S 103-class Nanobody FW3 sequence
RFTISRDNAKKTVYLRLNSLNPEDTAVYSCNL

SEQ ID NO: 118 - protein, 32 aa, Artificial
  P,R,S 103-class Nanobody FW3 sequence
RFKISRDNAKKTLYLQMNSLGPEDTAMYYCQR

SEQ ID NO: 119 - protein, 32 aa, Artificial
  P,R,S 103-class Nanobody FW3 sequence
RFTVSRDNGKNTAYLRMNSLKPEDTADYYCAV

SEQ ID NO: 120 - protein, 11 aa, Artificial
  P,R,S 103-class Nanobody FW4 sequence
RGQGTQVTVSS

SEQ ID NO: 121 - protein, 11 aa, Artificial
  P,R,S 103-class Nanobody FW4 sequence
LRGGTQVTVSS

SEQ ID NO: 122 - protein, 11 aa, Artificial
  P,R,S 103-class Nanobody FW4 sequence
GNKGTLVTVSS

SEQ ID NO: 123 - protein, 11 aa, Artificial
  P,R,S 103-class Nanobody FW4 sequence
SSPGTQVTVSS

SEQ ID NO: 124 - protein, 11 aa, Artificial
  P,R,S 103-class Nanobody FW4 sequence
SSQGTLVTVSS

SEQ ID NO: 125 - protein, 11 aa, Artificial
  P,R,S 103-class Nanobody FW4 sequence
RSRGIQVTVSS

SEQ ID NO: 126 - protein, 30 aa, Artificial
  FR1 sequences
EVQLVESGGGLVQAGGSLRLSCAVSGRTFS

SEQ ID NO: 127 - protein, 30 aa, Artificial
  FR1 sequences
EVQLVESGGGLVQPGGSLRLSCAASGFTFS

SEQ ID NO: 128 - protein, 30 aa, Artificial
  FR1 sequences
EVQLVESGGKLVQAGGSLRLSCAVSGRTSS

SEQ ID NO: 129 - protein, 30 aa, Artificial
  FR1 sequences
KVQLVESGGGLVQTGDSLRLSCAASGRAIG

SEQ ID NO: 130 - protein, 30 aa, Artificial
  FR1 sequences
EVQLVESGGGLVQAGGSLRLSCAASGRTIG

SEQ ID NO: 131 - protein, 30 aa, Artificial
  FR1 sequences
EVQLVESGGGLMQTGGSLRLSCAASGVTYS

SEQ ID NO: 132 - protein, 30 aa, Artificial
  FR1 sequences
EVQLVESEGGPVQSGGSLRLSCAASGRTFS

SEQ ID NO: 133 - protein, 30 aa, Artificial
  FR1 sequences
EVQLVESGGGSVQPGGSLRLSCAASGGTFS

SEQ ID NO: 134 - protein, 30 aa, Artificial
  FR1 sequences
EVQLVESGGGLVQAGGSLRLTCAASGRTFR

SEQ ID NO: 135 - protein, 30 aa, Artificial
  FR1 sequences
EVQLVESGGGLVQAGGSLRLSCAASGITFS

SEQ ID NO: 136 - protein, 30 aa, Artificial
  FR1 sequences
EVQLVESGGGLVQAGGSLRLSCAASGRTFS

SEQ ID NO: 137 - protein, 30 aa, Artificial
  FR1 sequences
EVQLVESGGGWMQAGGSLRLSCAASGRTFT

SEQ ID NO: 138 - protein, 30 aa, Artificial
  FR1 sequences
EVQLVESGGGLVQAGGSLRLSCAASGRTFR

SEQ ID NO: 139 - protein, 30 aa, Artificial
  FR1 sequences
EVQLVESGGGLVQAGGSLRLSCAASGRTSS

SEQ ID NO: 140 - protein, 30 aa, Artificial
  FR1 sequences
EVQLVESGGGLVQAGGSLRLSCAAAGGTFR

SEQ ID NO: 141 - protein, 30 aa, Artificial
  FR1 sequences
EVQLVESGGGLVQAGGSLRLSCVASRRTFS

SEQ ID NO: 142 - protein, 30 aa, Artificial
  FR1 sequences
EVQLVESGGGLVQVGDSLRLSCEASGRSRF

SEQ ID NO: 143 - protein, 30 aa, Artificial; identical to SEQ ID NO: 136
  FR1 sequences

SEQ ID NO: 144 - protein, 30 aa, Artificial
  FR1 sequences
EVQLVESGGGLVQAGDSLRLSCAASGRTVT

SEQ ID NO: 145 - protein, 30 aa, Artificial
  FR1 sequences
EVQLVESGGGLVQAGDSLRLSCAASGRTFT

SEQ ID NO: 146 - protein, 30 aa, Artificial
  FR1 sequences
EVQLVESGGGLVQAGGSLRLSCVASRRTFN

SEQ ID NO: 147 - protein, 30 aa, Artificial
  FR1 sequences
EVQLVESGGGLMQTGGSLRLSCAASERTSR

SEQ ID NO: 148 - protein, 29 aa, Artificial
  FR1 sequences
EVQLVESGGGLVQAGGSLRLSCAASGLTT

SEQ ID NO: 149 - protein, 30 aa, Artificial
  FR1 sequences
EVQLVEAGGGLVQAGDSLRLSCAASGRTIR

SEQ ID NO: 150 - protein, 30 aa, Artificial; identical to SEQ ID NO: 137
  FR1 sequences

SEQ ID NO: 151 - protein, 30 aa, Artificial; identical to SEQ ID NO: 138
  FR1 sequences

SEQ ID NO: 152 - protein, 30 aa, Artificial
  FR1 sequences
EVQLVESGGGLVQAGGSLRLSCAASGLTSS

SEQ ID NO: 153 - protein, 30 aa, Artificial
  FR1 sequences
EVQLVESGGGLVPAGGSLRLSCAASGLTDR

SEQ ID NO: 154 - protein, 30 aa, Artificial; identical to SEQ ID NO: 153
  FR1 sequences

SEQ ID NO: 155 - protein, 30 aa, Artificial; identical to SEQ ID NO: 140
  FR1 sequences

SEQ ID NO: 156 - protein, 30 aa, Artificial
  FR1 sequences
EVQLVESGGGLVQAGGSLTLSCAAAGFTFR

SEQ ID NO: 157 - protein, 30 aa, Artificial
  FR1 sequences
EVQLVESGGGLVQAGGSLRLSCAAAGCTFR

SEQ ID NO: 158 - protein, 30 aa, Artificial; identical to SEQ ID NO: 140
  FR1 sequences

SEQ ID NO: 159 - protein, 30 aa, Artificial; identical to SEQ ID NO: 140
  FR1 sequences

SEQ ID NO: 160 - protein, 30 aa, Artificial
  FR1 sequences
EVQLVESGGGLVQAGGSLRLSCAAAGYTFR

SEQ ID NO: 161 - protein, 30 aa, Artificial
  FR1 sequences
EVQLVESGGGLVQSGGSLRLSCAAAGYTFR

SEQ ID NO: 162 - protein, 30 aa, Artificial; identical to SEQ ID NO: 141
  FR1 sequences

SEQ ID NO: 163 - protein, 30 aa, Artificial
  FR1 sequences
EVQLVESGGGLVQAGGSLRLSCVASKRTFA

SEQ ID NO: 164 - protein, 30 aa, Artificial; identical to SEQ ID NO: 142
  FR1 sequences

SEQ ID NO: 165 - protein, 30 aa, Artificial; identical to SEQ ID NO: 142
  FR1 sequences

SEQ ID NO: 166 - protein, 30 aa, Artificial; identical to SEQ ID NO: 136
  FR1 sequences

SEQ ID NO: 167 - protein, 30 aa, Artificial; identical to SEQ ID NO: 136
  FR1 sequences

SEQ ID NO: 168 - protein, 30 aa, Artificial; identical to SEQ ID NO: 136
  FR1 sequences

SEQ ID NO: 169 - protein, 30 aa, Artificial; identical to SEQ ID NO: 136
  FR1 sequences

SEQ ID NO: 170 - protein, 30 aa, Artificial; identical to SEQ ID NO: 136
  FR1 sequences

SEQ ID NO: 171 - protein, 30 aa, Artificial; identical to SEQ ID NO: 136
  FR1 sequences

SEQ ID NO: 172 - protein, 30 aa, Artificial; identical to SEQ ID NO: 136
  FR1 sequences

SEQ ID NO: 173 - protein, 30 aa, Artificial; identical to SEQ ID NO: 136
  FR1 sequences

SEQ ID NO: 174 - protein, 30 aa, Artificial; identical to SEQ ID NO: 136
  FR1 sequences

SEQ ID NO: 175 - protein, 30 aa, Artificial
  FR1 sequences
EVQLVESGGGLVQAGDSLRLSCAASGRIFT

SEQ ID NO: 176 - protein, 30 aa, Artificial; identical to SEQ ID NO: 145
  FR1 sequences

SEQ ID NO: 177 - protein, 30 aa, Artificial; identical to SEQ ID NO: 145
  FR1 sequences

SEQ ID NO: 178 - protein, 30 aa, Artificial
  FR1 sequences
EVQLVESGGGSVQAGDSLRLSCAASGRTFT

SEQ ID NO: 179 - protein, 30 aa, Artificial; identical to SEQ ID NO: 145
  FR1 sequences

SEQ ID NO: 180 - protein, 30 aa, Artificial; identical to SEQ ID NO: 145
  FR1 sequences

SEQ ID NO: 181 - protein, 30 aa, Artificial; identical to SEQ ID NO: 145
  FR1 sequences

SEQ ID NO: 182 - protein, 30 aa, Artificial; identical to SEQ ID NO: 145
  FR1 sequences

SEQ ID NO: 183 - protein, 30 aa, Artificial; identical to SEQ ID NO: 145
  FR1 sequences

SEQ ID NO: 184 - protein, 30 aa, Artificial
  FR1 sequences
EMQLVESGGGLVQAGGSLRLSCVASKRTFA

SEQ ID NO: 185 - protein, 30 aa, Artificial
  FR1 sequences
EVQLVESGGGLVQTGGSLRLSCVASRRTFS

SEQ ID NO: 186 - protein, 30 aa, Artificial; identical to SEQ ID NO: 140
  FR1 sequences

SEQ ID NO: 187 - protein, 30 aa, Artificial
  FR1 sequences
EVQLVESGGGLVQAGDSLRLSCAAAGFTFR

SEQ ID NO: 188 - protein, 5 aa, Artificial
  CDR sequence
SSTMA

SEQ ID NO: 189 - protein, 5 aa, Artificial
  CDR sequence
SYYMS

SEQ ID NO: 190 - protein, 5 aa, Artificial
  CDR sequence
IYNMA

SEQ ID NO: 191 - protein, 5 aa, Artificial
  CDR sequence
SYAMG

SEQ ID NO: 192 - protein, 5 aa, Artificial
  CDR sequence
GHTMA

SEQ ID NO: 193 - protein, 5 aa, Artificial
  CDR sequence
YYTAS

SEQ ID NO: 194 - protein, 5 aa, Artificial
  CDR sequence
VSTIA

SEQ ID NO: 195 - protein, 5 aa, Artificial
  CDR sequence
RYAMG

SEQ ID NO: 196 - protein, 5 aa, Artificial
  CDR sequence
SYAMG

SEQ ID NO: 197 - protein, 5 aa, Artificial
  CDR sequence
SRTMG

SEQ ID NO: 198 - protein, 5 aa, Artificial
  CDR sequence
SKTMG

SEQ ID NO: 199 - protein, 2 aa, Artificial
  CDR sequence
MA

SEQ ID NO: 200 - protein, 5 aa, Artificial
  CDR sequence
SYPMG

SEQ ID NO: 201 - protein, 5 aa, Artificial
  CDR sequence
YYTMS

SEQ ID NO: 202 - protein, 5 aa, Artificial
  CDR sequence
NYVMG

SEQ ID NO: 203 - protein, 5 aa, Artificial
  CDR sequence
SYAMG

SEQ ID NO: 204 - protein, 6 aa, Artificial
  CDR sequence
STYVMG

SEQ ID NO: 205 - protein, 5 aa, Artificial
  CDR sequence
RSAMG

SEQ ID NO: 206 - protein, 2 aa, Artificial
  CDR sequence
MG

SEQ ID NO: 207 - protein, 2 aa, Artificial
  CDR sequence
MG

SEQ ID NO: 208 - protein, 5 aa, Artificial
  CDR sequence
SYAVG

SEQ ID NO: 209 - protein, 5 aa, Artificial
  CDR sequence
NYGMG

SEQ ID NO: 210 - protein, 5 aa, Artificial
  CDR sequence
VYTMA

SEQ ID NO: 211 - protein, 4 aa, Artificial
  CDR sequence
GTMA

SEQ ID NO: 212 - protein, 2 aa, Artificial
  CDR sequence
MA

SEQ ID NO: 213 - protein, 5 aa, Artificial
  CDR sequence
SYPMG

SEQ ID NO: 214 - protein, 5 aa, Artificial
  CDR sequence
RYTMS

SEQ ID NO: 215 - protein, 5 aa, Artificial
  CDR sequence
RYTMS

SEQ ID NO: 216 - protein, 5 aa, Artificial
  CDR sequence
RYTMS

SEQ ID NO: 217 - protein, 5 aa, Artificial
  CDR sequence
NYVMG

SEQ ID NO: 218 - protein, 5 aa, Artificial
  CDR sequence
RYVMG

SEQ ID NO: 219 - protein, 5 aa, Artificial
  CDR sequence
NYVMG

SEQ ID NO: 220 - protein, 5 aa, Artificial
  CDR sequence
NYVMG

SEQ ID NO: 221 - protein, 5 aa, Artificial
  CDR sequence
NYVMG

SEQ ID NO: 222 - protein, 5 aa, Artificial
  CDR sequence
AYVMG

SEQ ID NO: 223 - protein, 7 aa, Artificial
  CDR sequence
ARAYVMG

SEQ ID NO: 224 - protein, 5 aa, Artificial
  CDR sequence
SYAMG

SEQ ID NO: 225 - protein, 5 aa, Artificial
  CDR sequence
SYAMG

SEQ ID NO: 226 - protein, 6 aa, Artificial
  CDR sequence
STYVMG

SEQ ID NO: 227 - protein, 6 aa, Artificial
  CDR sequence
STYVMG

SEQ ID NO: 228 - protein, 5 aa, Artificial
  CDR sequence
RSAMG

SEQ ID NO: 229 - protein, 5 aa, Artificial
  CDR sequence
RSAMG

SEQ ID NO: 230 - protein, 5 aa, Artificial
  CDR sequence
RSAMG

SEQ ID NO: 231 - protein, 5 aa, Artificial
  CDR sequence
RSAMG

SEQ ID NO: 232 - protein, 5 aa, Artificial
  CDR sequence
ISAMG

SEQ ID NO: 233 - protein, 5 aa, Artificial
  CDR sequence
RSAMG

SEQ ID NO: 234 - protein, 5 aa, Artificial
  CDR sequence
RSAMG

SEQ ID NO: 235 - protein, 5 aa, Artificial
  CDR sequence
RSAMG

SEQ ID NO: 236 - protein, 5 aa, Artificial
  CDR sequence
RSAMG

SEQ ID NO: 237 - protein, 2 aa, Artificial
  CDR sequence
MG

SEQ ID NO: 238 - protein, 2 aa, Artificial
  CDR sequence
MG

SEQ ID NO: 239 - protein, 2 aa, Artificial
  CDR sequence
MG

SEQ ID NO: 240 - protein, 2 aa, Artificial
  CDR sequence
MG

SEQ ID NO: 241 - protein, 2 aa, Artificial
  CDR sequence
MG

SEQ ID NO: 242 - protein, 2 aa, Artificial
  CDR sequence
MG

SEQ ID NO: 243 - protein, 2 aa, Artificial
  CDR sequence
MG

SEQ ID NO: 244 - protein, 2 aa, Artificial
  CDR sequence
MG

SEQ ID NO: 245 - protein, 2 aa, Artificial
  CDR sequence
MG

SEQ ID NO: 246 - protein, 5 aa, Artificial
  CDR sequence
SYAMG

SEQ ID NO: 247 - protein, 5 aa, Artificial
  CDR sequence
SYAVG

SEQ ID NO: 248 - protein, 5 aa, Artificial
  CDR sequence
NYVMG

SEQ ID NO: 249 - protein, 5 aa, Artificial
  CDR sequence
RYVMG

SEQ ID NO: 250 - protein, 14 aa, Artificial
  FR2 sequence
WFRQPPGGERDFVA

SEQ ID NO: 251 - protein, 14 aa, Artificial
  FR2 sequence
WVRQAPGKGLEWVS

SEQ ID NO: 252 - protein, 14 aa, Artificial
  FR2 sequence
WFRQGPGKGRESVG

SEQ ID NO: 253 - protein, 14 aa, Artificial
  FR2 sequence
WFRQAPGKEREFVA

SEQ ID NO: 254 - protein, 14 aa, Artificial
  FR2 sequence
WFRQAPGKERDFVA

SEQ ID NO: 255 - protein, 14 aa, Artificial
  FR2 sequence
WFRQAPGKEREFVA

SEQ ID NO: 256 - protein, 14 aa, Artificial
  FR2 sequence
WFRQAPGEGREFVA

SEQ ID NO: 257 - protein, 14 aa, Artificial
  FR2 sequence
WFRQAPGKEREFVS

SEQ ID NO: 258 - protein, 14 aa, Artificial
  FR2 sequence
WFRQAPGKEREFVA

SEQ ID NO: 259 - protein, 14 aa, Artificial
  FR2 sequence
WFRQAPGKEREFVA

SEQ ID NO: 260 - protein, 14 aa, Artificial
  FR2 sequence
WFRQPPGNEREFVA

SEQ ID NO: 261 - protein, 14 aa, Artificial
  FR2 sequence
WFRQAPGKEREFVA

SEQ ID NO: 262 - protein, 14 aa, Artificial
  FR2 sequence
WFRQAPGKEREFVA

SEQ ID NO: 263 - protein, 14 aa, Artificial
  FR2 sequence
WFRQDPGKEREFVA

SEQ ID NO: 264 - protein, 14 aa, Artificial
  FR2 sequence
WFRQAPGKEREFVT

SEQ ID NO: 265 - protein, 14 aa, Artificial
  FR2 sequence
WFRQVPGKERDFVA

SEQ ID NO: 266 - protein, 14 aa, Artificial
  FR2 sequence
WFRQAPGKEREFVA

SEQ ID NO: 267 - protein, 14 aa, Artificial
  FR2 sequence
WFRQAPGKEREFVG

SEQ ID NO: 268 - protein, 14 aa, Artificial
  FR2 sequence
WFRQAPGKEREFVA

SEQ ID NO: 269 - protein, 14 aa, Artificial
  FR2 sequence
WFRQAPGTEREFVA

SEQ ID NO: 270 - protein, 14 aa, Artificial
  FR2 sequence
WFRQVPGEERDFVA

SEQ ID NO: 271 - protein, 14 aa, Artificial
  FR2 sequence
WFRQAPGKEREFVA

SEQ ID NO: 272 - protein, 14 aa, Artificial
  FR2 sequence
WFRQAPGKEREFVA

SEQ ID NO: 273 - protein, 14 aa, Artificial
  FR2 sequence
WFRQAPGKDREFVA

SEQ ID NO: 274 - protein, 14 aa, Artificial
  FR2 sequence
WFRQASGKEREFVA

SEQ ID NO: 275 - protein, 14 aa, Artificial
  FR2 sequence
WFRQAPGKEREFVA

SEQ ID NO: 276 - protein, 14 aa, Artificial
  FR2 sequence
WFRQDPGKEREFVA

SEQ ID NO: 277 - protein, 14 aa, Artificial
  FR2 sequence
WFRQDPGKEREFVA

SEQ ID NO: 278 - protein, 14 aa, Artificial
  FR2 sequence
WFRQDPGKEREFVA

SEQ ID NO: 279 - protein, 14 aa, Artificial
  FR2 sequence
WFRQAPGKEREFVT

SEQ ID NO: 280 - protein, 14 aa, Artificial
  FR2 sequence
WFRQAPGKEREFVA

SEQ ID NO: 281 - protein, 14 aa, Artificial
  FR2 sequence
WFRQAPGKEREFVT

SEQ ID NO: 282 - protein, 14 aa, Artificial
  FR2 sequence
WFRQAPGKEREFVA

SEQ ID NO: 283 - protein, 14 aa, Artificial
  FR2 sequence
WFRQAPGKEREFVT

SEQ ID NO: 284 - protein, 14 aa, Artificial
  FR2 sequence
WFRQAPGKEREFVA

SEQ ID NO: 285 - protein, 14 aa, Artificial
  FR2 sequence
WFRQAPGKEREFVA

SEQ ID NO: 286 - protein, 14 aa, Artificial
  FR2 sequence
WFRQVPGKERDFVA

SEQ ID NO: 287 - protein, 14 aa, Artificial
  FR2 sequence
WFRQVPGKERDFVA

SEQ ID NO: 288 - protein, 14 aa, Artificial
  FR2 sequence
WFRQAPGKEREFVA

SEQ ID NO: 289 - protein, 14 aa, Artificial
  FR2 sequence
WFRQAPGKEREFVA

SEQ ID NO: 290 - protein, 14 aa, Artificial
  FR2 sequence
WFRQAPGKEREFVG

SEQ ID NO: 291 - protein, 14 aa, Artificial
  FR2 sequence
WFRQAPGKEREFVG

SEQ ID NO: 292 - protein, 14 aa, Artificial
  FR2 sequence
WFRQAPGKEREFVG

SEQ ID NO: 293 - protein, 14 aa, Artificial
  FR2 sequence
WFRQAPGKEREFVG

SEQ ID NO: 294 - protein, 14 aa, Artificial
  FR2 sequence
WFRQAPGKEREFVC

SEQ ID NO: 295 - protein, 14 aa, Artificial
  FR2 sequence
WFRQAPGKEREFVG

SEQ ID NO: 296 - protein, 14 aa, Artificial
  FR2 sequence
WFRQAPGKEREFVG

SEQ ID NO: 297 - protein, 14 aa, Artificial
  FR2 sequence
WFRQAPGKEREFVG

SEQ ID NO: 298 - protein, 14 aa, Artificial
  FR2 sequence
WFRQAPGKEREFVG

SEQ ID NO: 299 - protein, 14 aa, Artificial
  FR2 sequence
WFRQAPGKEREFVA

SEQ ID NO: 300 - protein, 14 aa, Artificial
  FR2 sequence
WFRQAPGKEREFVA

SEQ ID NO: 301 - protein, 14 aa, Artificial
  FR2 sequence
WFRRAPGTEREFVA

SEQ ID NO: 302 - protein, 14 aa, Artificial
  FR2 sequence
WFRQAPGTEREFVA

SEQ ID NO: 303 - protein, 14 aa, Artificial
  FR2 sequence
WFRQAPGTEREFVA

SEQ ID NO: 304 - protein, 14 aa, Artificial
  FR2 sequence
WFRQAPGTEREFVA

SEQ ID NO: 305 - protein, 14 aa, Artificial
  FR2 sequence
WFRQAPGTEREFVA

SEQ ID NO: 306 - protein, 14 aa, Artificial
  FR2 sequence
WFRQAPGTEREFVA

SEQ ID NO: 307 - protein, 14 aa, Artificial
  FR2 sequence
WFRQAPGTEREFVA

SEQ ID NO: 308 - protein, 14 aa, Artificial
  FR2 sequence
WFRQVPGKERDFVA

SEQ ID NO: 309 - protein, 14 aa, Artificial
  FR2 sequence
WFRQVPGKERDFVA

SEQ ID NO: 310 - protein, 14 aa, Artificial
  FR2 sequence
WFRQAPGKEREFVT

SEQ ID NO: 311 - protein, 14 aa, Artificial
  FR2 sequence
WFRQAPGKEREFVA

SEQ ID NO: 312 - protein, 17 aa, Artificial
  CDR sequence
SISTSGTRTLYADSVKG

SEQ ID NO: 313 - protein, 17 aa, Artificial
  CDR sequence
SIYSDGSTTDYADSVKG

SEQ ID NO: 314 - protein, 17 aa, Artificial
  CDR sequence
RIYWSDDNTYYADSVKG

SEQ ID NO: 315 - protein, 17 aa, Artificial
  CDR sequence
VINYRGSSLKYADRVKG

SEQ ID NO: 316 - protein, 17 aa, Artificial
  CDR sequence
TITSSGSTIFYADSVKG

SEQ ID NO: 317 - protein, 16 aa, Artificial
  CDR sequence
AISPSGNTYYADSVKG

SEQ ID NO: 318 - protein, 17 aa, Artificial
  CDR sequence
AIYPSGRNAYVADSVKG

SEQ ID NO: 319 - protein, 17 aa, Artificial
  CDR sequence
AISVGGTYQYYVDSVKG

SEQ ID NO: 320 - protein, 17 aa, Artificial
  CDR sequence
AINYSGGSTNYADSVKG

SEQ ID NO: 321 - protein, 17 aa, Artificial
  CDR sequence
AITPSSRTTYYADSVKG

SEQ ID NO: 322 - protein, 17 aa, Artificial
  CDR sequence
AITPTSRTTYYADSVKG

SEQ ID NO: 323 - protein, 17 aa, Artificial
  CDR sequence
AITGSGRSTYYTDSVKG

SEQ ID NO: 324 - protein, 17 aa, Artificial
  CDR sequence
SITGSGGSTYYADSVKG

SEQ ID NO: 325 - protein, 16 aa, Artificial
  CDR sequence
AVPLSGNTYYADPVRG

SEQ ID NO: 326 - protein, 17 aa, Artificial
  CDR sequence
AISTGGSWTGYVDSVKD

SEQ ID NO: 327 - protein, 16 aa, Artificial
  CDR sequence
AISTGSITIYGDSVKG

SEQ ID NO: 328 - protein, 17 aa, Artificial
  CDR sequence
AVSWSSGNAYYIDSAKG

SEQ ID NO: 329 - protein, 17 aa, Artificial
  CDR sequence
FITGSGGTTYYGESVKG

SEQ ID NO: 330 - protein, 17 aa, Artificial
  CDR sequence
SITGSGSVTNYADSVKG

SEQ ID NO: 331 - protein, 17 aa, Artificial
  CDR sequence
AISGSGKITNYADSVKG

SEQ ID NO: 332 - protein, 16 aa, Artificial
  CDR sequence
AISTGSVTIYADSVKG

SEQ ID NO: 333 - protein, 17 aa, Artificial
  CDR sequence
AITSAGGTTYYGDFVKG

SEQ ID NO: 334 - protein, 17 aa, Artificial
  CDR sequence
AITRSGKTTYYADSVKG

SEQ ID NO: 335 - protein, 17 aa, Artificial
  CDR sequence
TVTSSGSTTFYADSVKG

SEQ ID NO: 336 - protein, 17 aa, Artificial
  CDR sequence
AITGSGRSTYYTDSVKG

SEQ ID NO: 337 - protein, 17 aa, Artificial
  CDR sequence
SITGSGGSTYYADSVKG

SEQ ID NO: 338 - protein, 16 aa, Artificial
  CDR sequence
AVPLSGNTYYADPVRG

SEQ ID NO: 339 - protein, 16 aa, Artificial
  CDR sequence
AVPLSGNTYYADPVRG

SEQ ID NO: 340 - protein, 16 aa, Artificial
  CDR sequence
AVPLSGNTYYADPVRG

SEQ ID NO: 341 - protein, 17 aa, Artificial
  CDR sequence
AISTGGSWTGYVDSVKD

SEQ ID NO: 342 - protein, 17 aa, Artificial
  CDR sequence
AISTGGTWTGYVDSVKD

SEQ ID NO: 343 - protein, 17 aa, Artificial
  CDR sequence
AISTGGTWTGYVDSVKD

SEQ ID NO: 344 - protein, 17 aa, Artificial
  CDR sequence
AISTGGSWTGYVDSVKD

SEQ ID NO: 345 - protein, 17 aa, Artificial
  CDR sequence
AISAGGSWTGYVDSVKD

SEQ ID NO: 346 - protein, 17 aa, Artificial
  CDR sequence
GISTGGTWTGYVDSVKD

SEQ ID NO: 347 - protein, 17 aa, Artificial
  CDR sequence
AISTGGTWTGYVDSVKD

SEQ ID NO: 348 - protein, 16 aa, Artificial
  CDR sequence
AISTGSITIYGDSVKG

SEQ ID NO: 349 - protein, 16 aa, Artificial
  CDR sequence
AITTGSITIYADSVKG

SEQ ID NO: 350 - protein, 17 aa, Artificial
  CDR sequence
AVSWSSGNAYYIDSAKG

SEQ ID NO: 351 - protein, 17 aa, Artificial
  CDR sequence
AISWSSGNAYYIDSAKG

SEQ ID NO: 352 - protein, 17 aa, Artificial
  CDR sequence
FITGSGGTTYYGESVKG

SEQ ID NO: 353 - protein, 17 aa, Artificial
  CDR sequence
FITGSGGTTYYGESVKG

SEQ ID NO: 354 - protein, 17 aa, Artificial
  CDR sequence
FITGSGGTTYYGESVKG

SEQ ID NO: 355 - protein, 17 aa, Artificial
  CDR sequence
FITGSGGTTYYGESVKG

SEQ ID NO: 356 - protein, 17 aa, Artificial
  CDR sequence
FITGSGGTTYYGESVKG

SEQ ID NO: 357 - protein, 17 aa, Artificial
  CDR sequence
FITGSGGTTYYGESVKG

SEQ ID NO: 358 - protein, 17 aa, Artificial
  CDR sequence
FITGSGGTTYYGESVKG

SEQ ID NO: 359 - protein, 17 aa, Artificial
  CDR sequence
FITGSGGTTYYGESVKG

SEQ ID NO: 360 - protein, 17 aa, Artificial
  CDR sequence
FITGSGGTTYYGESVKG

SEQ ID NO: 361 - protein, 17 aa, Artificial
  CDR sequence
AISGSGSITNYADSVKG

SEQ ID NO: 362 - protein, 17 aa, Artificial
  CDR sequence
FISGSGSVTNYTDSVKG

SEQ ID NO: 363 - protein, 17 aa, Artificial
  CDR sequence
SISGSGKITNYADSVKG

SEQ ID NO: 364 - protein, 17 aa, Artificial
  CDR sequence
AISGSGKITNYADSVKG

SEQ ID NO: 365 - protein, 17 aa, Artificial
  CDR sequence
AISGSGKITNYADSVKG

SEQ ID NO: 366 - protein, 17 aa, Artificial
  CDR sequence
AISGSGKITNYADSVKG

SEQ ID NO: 367 - protein, 17 aa, Artificial
  CDR sequence
AISGSGKITNYADSVKG

SEQ ID NO: 368 - protein, 17 aa, Artificial
  CDR sequence
AISGSGKITNYADSVKG

SEQ ID NO: 369 - protein, 17 aa, Artificial
  CDR sequence
AISGSGKITNYADSVKG

SEQ ID NO: 370 - protein, 16 aa, Artificial
  CDR sequence
AISTHSITVYADSVKG

SEQ ID NO: 371 - protein, 16 aa, Artificial
  CDR sequence
AISTGSVTIYADSVKG

SEQ ID NO: 372 - protein, 17 aa, Artificial
  CDR sequence
AISTGGSWTGYVDSVKD

SEQ ID NO: 373 - protein, 17 aa, Artificial
  CDR sequence
AISTGGTWTGYVDSVKD

SEQ ID NO: 374 - protein, 32 aa, Artificial
  FR3 sequence
RFTISRDNAKSTGYLQMNSLKPEDTAVYFCAA

SEQ ID NO: 375 - protein, 32 aa, Artificial
  FR3 sequence
RFTISRDNAKNTLNLQMNSLKSEDTAVYYCAK

SEQ ID NO: 376 - protein, 32 aa, Artificial
  FR3 sequence
RFTISRDNATNTVYLQMNSLKPEDTAVYYCAG

SEQ ID NO: 377 - protein, 32 aa, Artificial
  FR3 sequence
RFTISRDNAKNMVYLQMNSLKPDDTAVYYCAA

SEQ ID NO: 378 - protein, 32 aa, Artificial
  FR3 sequence
RFTISRDNGKKTMTLEMDSLKPEDTAVYYCAA

SEQ ID NO: 379 - protein, 32 aa, Artificial
  FR3 sequence
RFTISRDNGKHTMYLQMNSLNPEDTAVYFCAI

SEQ ID NO: 380 - protein, 32 aa, Artificial
  FR3 sequence
RFTISRDNAKKTVYLQMNSLKPEDTAAYYCAA

SEQ ID NO: 381 - protein, 32 aa, Artificial
  FR3 sequence
RFTISRDNAESTVYLQMNSLKPEDTAVYYCAG

SEQ ID NO: 382 - protein, 32 aa, Artificial
  FR3 sequence
RFTISRDNAKNTLYLQMNSLEPEDTAVYYCAA

SEQ ID NO: 383 - protein, 32 aa, Artificial
  FR3 sequence
RFTISRDNAKNTVLLQMNSLKPEDTAVYYCAA

SEQ ID NO: 384 - protein, 32 aa, Artificial
  FR3 sequence
RFTISRDNAKNTVSLQMNSLKFEDTAAYYCVA

SEQ ID NO: 385 - protein, 32 aa, Artificial
  FR3 sequence
RFTISRDNAKNTAYLQMKSLKPEDTAVYYCAG

SEQ ID NO: 386 - protein, 32 aa, Artificial
  FR3 sequence
RFTISRDNAKNTVYLQMNSLRPEDTAVYSCAA

SEQ ID NO: 387 - protein, 32 aa, Artificial
  FR3 sequence
RFTISRDNAKNTADLQMNSLKPEDTAVYYCAA

SEQ ID NO: 388 - protein, 32 aa, Artificial
  FR3 sequence
RFTISRDNTKNTVYLQMASLKPEDTAVYYCAA

SEQ ID NO: 389 - protein, 32 aa, Artificial; identical to SEQ ID NO: 112
  FR3 sequence

SEQ ID NO: 390 - protein, 32 aa, Artificial
  FR3 sequence
RFATSRDTAKNIMYLQMNSLKPEDTAVYTCAA

SEQ ID NO: 391 - protein, 32 aa, Artificial
  FR3 sequence
RFTISRDNAQNPVYLQMNSLKPEDTAVYYCGV

SEQ ID NO: 392 - protein, 32 aa, Artificial
  FR3 sequence
RFTISRDNAKNTVFLQMNSLKPEDTAVYYCAA

SEQ ID NO: 393 - protein, 32 aa, Artificial
  FR3 sequence
RFTISRDHAKNTVFLQMDSLKPEDTAVYYCAG

SEQ ID NO: 394 - protein, 32 aa, Artificial; identical to SEQ ID NO: 112
  FR3 sequence

SEQ ID NO: 395 - protein, 32 aa, Artificial
  FR3 sequence
RFTISRDSAKYTVYLQMNSLKPEDTAVYWCAA

SEQ ID NO: 396 - protein, 32 aa, Artificial
  FR3 sequence
RFTISRDNAKNTVNLQMNSLKPDDTAVYYCAA

SEQ ID NO: 397 - protein, 32 aa, Artificial
  FR3 sequence
RFTISRDNAENTVNLQMDSLKPEDTAVYYCAA

SEQ ID NO: 398 - protein, 32 aa, Artificial; identical to SEQ ID NO: 385
  FR3 sequence

SEQ ID NO: 399 - protein, 32 aa, Artificial; identical to SEQ ID NO: 386
  FR3 sequence

SEQ ID NO: 400 - protein, 32 aa, Artificial
  FR3 sequence
RFTISRDNAKNTVDLQMNSLKPEDTAVYYCAA

SEQ ID NO: 401 - protein, 32 aa, Artificial; identical to SEQ ID NO: 400
  FR3 sequence

SEQ ID NO: 402 - protein, 32 aa, Artificial; identical to SEQ ID NO: 400
  FR3 sequence

SEQ ID NO: 403 - protein, 32 aa, Artificial; identical to SEQ ID NO: 388
  FR3 sequence

SEQ ID NO: 404 - protein, 32 aa, Artificial
  FR3 sequence
RFTISRDNTKNTVYLQMASLKPEDTAVYNCAA

SEQ ID NO: 405 - protein, 32 aa, Artificial
  FR3 sequence
RFTISRDNTKNTVNLQMASLKPEDTAVYYCAA

SEQ ID NO: 406 - protein, 32 aa, Artificial
  FR3 sequence
RFTISRDNTKNTVYLQMVSLKPEDTAVYYCAA

SEQ ID NO: 407 - protein, 32 aa, Artificial; identical to SEQ ID NO: 388
  FR3 sequence

SEQ ID NO: 408 - protein, 32 aa, Artificial; identical to SEQ ID NO: 388
  FR3 sequence

SEQ ID NO: 409 - protein, 32 aa, Artificial
  FR3 sequence
RFTISRDNTKNTMYLQMASLKPEDTAVYYCAA

SEQ ID NO: 410 - protein, 32 aa, Artificial; identical to SEQ ID NO: 112
  FR3 sequence

SEQ ID NO: 411 - protein, 32 aa, Artificial
  FR3 sequence
RFAISRDNAKNTVYLQMNSLKPEDTAVYYCAA

SEQ ID NO: 412 - protein, 32 aa, Artificial; identical to SEQ ID NO: 390
  FR3 sequence

SEQ ID NO: 413 - protein, 32 aa, Artificial
  FR3 sequence
RFATSRDTAKNIMYLQMNSLKPEDTAVYSCAA

SEQ ID NO: 414 - protein, 32 aa, Artificial; identical to SEQ ID NO: 391
  FR3 sequence

SEQ ID NO: 415 - protein, 32 aa, Artificial
  FR3 sequence
RFTISRDNAQNPVYLQMNSLKPEDTAVYYCAV

SEQ ID NO: 416 - protein, 32 aa, Artificial; identical to SEQ ID NO: 391
  FR3 sequence

SEQ ID NO: 417 - protein, 32 aa, Artificial; identical to SEQ ID NO: 391
  FR3 sequence

SEQ ID NO: 418 - protein, 32 aa, Artificial; identical to SEQ ID NO: 391
  FR3 sequence

SEQ ID NO: 419 - protein, 32 aa, Artificial; identical to SEQ ID NO: 391
  FR3 sequence

SEQ ID NO: 420 - protein, 32 aa, Artificial; identical to SEQ ID NO: 391
  FR3 sequence

SEQ ID NO: 421 - protein, 32 aa, Artificial; identical to SEQ ID NO: 415
  FR3 sequence

SEQ ID NO: 422 - protein, 32 aa, Artificial; identical to SEQ ID NO: 391
  FR3 sequence

SEQ ID NO: 423 - protein, 32 aa, Artificial
  FR3 sequence
RFTISRDYAKTTVFLQMNSLKPEDTAVYYCAA

SEQ ID NO: 424 - protein, 32 aa, Artificial
  FR3 sequence
RFTISRDHAKNTVFLQMNSLKPEDTAVYYCAA

SEQ ID NO: 425 - protein, 32 aa, Artificial
  FR3 sequence
RFTISRDHAKNAVFLQMDGLKPEDTAVYYCAA

SEQ ID NO: 426 - protein, 32 aa, Artificial
  FR3 sequence
RFTISRDHAMNTVFLQMDSLKPEDTAVYYCAA

SEQ ID NO: 427 - protein, 32 aa, Artificial
  FR3 sequence
RFTISRDHAKNTVFLQMDSLKPEDTAVYYCAA

SEQ ID NO: 428 - protein, 32 aa, Artificial; identical to SEQ ID NO: 427
  FR3 sequence

SEQ ID NO: 429 - protein, 32 aa, Artificial; identical to SEQ ID NO: 427
  FR3 sequence

SEQ ID NO: 430 - protein, 32 aa, Artificial; identical to SEQ ID NO: 427
  FR3 sequence

SEQ ID NO: 431 - protein, 32 aa, Artificial; identical to SEQ ID NO: 427
  FR3 sequence

SEQ ID NO: 432 - protein, 32 aa, Artificial
  FR3 sequence
RFTISRDNAKNTVYLQMNTLKPEDTAVYYCAA

SEQ ID NO: 433 - protein, 32 aa, Artificial
  FR3 sequence
RFTISRDNTKNTVYLQMNSLKPEDTAVYYCAA

SEQ ID NO: 434 - protein, 32 aa, Artificial
  FR3 sequence
RFTISRDNTKNTVYLHMASLKPEDTAVYYCAA

SEQ ID NO: 435 - protein, 32 aa, Artificial; identical to SEQ ID NO: 404
  FR3 sequence

SEQ ID NO: 436 - protein, 17 aa, Artificial
  CDR sequence
VNRRGWEFWRLASGYDY

SEQ ID NO: 437 - protein, 11 aa, Artificial
  CDR sequence
DANSGGLEYDY

SEQ ID NO: 438 - protein, 11 aa, Artificial
  CDR sequence
KTTKWSLEYDY

SEQ ID NO: 439 - protein, 16 aa, Artificial
  CDR sequence
QTSGADFGTTPQRYTY

SEQ ID NO: 440 - protein, 15 aa, Artificial
  CDR sequence
RIRGKVTVDNFDYAY

SEQ ID NO: 441 - protein, 14 aa, Artificial
  CDR sequence
RATDSIYYASSYRH

SEQ ID NO: 442 - protein, 15 aa, Artificial
  CDR sequence
HQPSGSYYSAEAYAY

SEQ ID NO: 443 - protein, 18 aa, Artificial
  CDR sequence
DASPYGYLREYTATRFDY

SEQ ID NO: 444 - protein, 18 aa, Artificial
  CDR sequence
GSGYASLSYYSTERAYTY

SEQ ID NO: 445 - protein, 16 aa, Artificial
  CDR sequence
ERTYGSNYTRPTAWNY

SEQ ID NO: 446 - protein, 16 aa, Artificial
  CDR sequence
VRRYGSPPHDGSSYEY

SEQ ID NO: 447 - protein, 16 aa, Artificial
  CDR sequence
LRGLGLEYDSAKSYSY

SEQ ID NO: 448 - protein, 17 aa, Artificial
  CDR sequence
YIRPDTYLSRDYRKYDY

SEQ ID NO: 449 - protein, 14 aa, Artificial
  CDR sequence
RASGSIYNRGSYAY

SEQ ID NO: 450 - protein, 17 aa, Artificial
  CDR sequence
TTPATTYLPRSERQYDY

SEQ ID NO: 451 - protein, 18 aa, Artificial
  CDR sequence
GKREPYLRQYTASNPYDY

SEQ ID NO: 452 - protein, 18 aa, Artificial
  CDR sequence
GRGYGLLSEYTQAPRYDY

SEQ ID NO: 453 - protein, 18 aa, Artificial
  CDR sequence
YRRTYISSTYSESSEYDY

SEQ ID NO: 454 - protein, 18 aa, Artificial
  CDR sequence
YLPSPYYSSYYDSTKYEY

SEQ ID NO: 455 - protein, 18 aa, Artificial
  CDR sequence
YLRSPYYSSFYDSAKYEY

SEQ ID NO: 456 - protein, 18 aa, Artificial
  CDR sequence
GNREPYLRQYTASNPYDY

SEQ ID NO: 457 - protein, 16 aa, Artificial
  CDR sequence
KLQIGGRWHNLNDYGY

SEQ ID NO: 458 - protein, 14 aa, Artificial
  CDR sequence
KALLGMTNPAGYEY

SEQ ID NO: 459 - protein, 15 aa, Artificial
  CDR sequence
RIRGKVTPSNYDYAY

SEQ ID NO: 460 - protein, 16 aa, Artificial
  CDR sequence
LRGLGLEYDSAKSYSY

SEQ ID NO: 461 - protein, 17 aa, Artificial
  CDR sequence
YIRPDTYLSRDYRKYDY

SEQ ID NO: 462 - protein, 14 aa, Artificial
  CDR sequence
RASGSIFNRGSYAY

SEQ ID NO: 463 - protein, 14 aa, Artificial
  CDR sequence
RASGSIFNRGSYAY

SEQ ID NO: 464 - protein, 14 aa, Artificial
  CDR sequence
RASGSIFNRGSYAY

SEQ ID NO: 465 - protein, 17 aa, Artificial
  CDR sequence
TMPATTYLPRSERQYDY

SEQ ID NO: 466 - protein, 17 aa, Artificial
  CDR sequence
TTPTTSYLPRSERQYEY

SEQ ID NO: 467 - protein, 17 aa, Artificial
  CDR sequence
TTPTTSYLPRSERQYEY

SEQ ID NO: 468 - protein, 17 aa, Artificial
  CDR sequence
TTPATTYLPRSERQYDY

SEQ ID NO: 469 - protein, 17 aa, Artificial
  CDR sequence
TTPATTYLPRSERQYDY

SEQ ID NO: 470 - protein, 17 aa, Artificial
  CDR sequence
TTPVTSYLPRSERQYEH

SEQ ID NO: 471 - protein, 17 aa, Artificial
  CDR sequence
TTPSTSYLPRSERQYEY

SEQ ID NO: 472 - protein, 18 aa, Artificial
  CDR sequence
GKREPYLRQYTASNPYDY

SEQ ID NO: 473 - protein, 18 aa, Artificial
  CDR sequence
GNREPYLRQYTASNPYDY

SEQ ID NO: 474 - protein, 18 aa, Artificial
  CDR sequence
GRGYGLLSEYTQAPRYDY

SEQ ID NO: 475 - protein, 18 aa, Artificial
  CDR sequence
GRGYGLLSEYTQAARYDY

SEQ ID NO: 476 - protein, 18 aa, Artificial
  CDR sequence
YRRTYISSTYSESSEYDY

SEQ ID NO: 477 - protein, 18 aa, Artificial
  CDR sequence
YRRTYISSTYNESSEYDY

SEQ ID NO: 478 - protein, 18 aa, Artificial
  CDR sequence
YRRTYISSTYSESSEYDY

SEQ ID NO: 479 - protein, 18 aa, Artificial
  CDR sequence
YRRTYISITYSESSDYDY

SEQ ID NO: 480 - protein, 18 aa, Artificial
  CDR sequence
YRRTYISSTYSESSEYDY

SEQ ID NO: 481 - protein, 18 aa, Artificial
  CDR sequence
YRRTYISSTYSESSEYDY

SEQ ID NO: 482 - protein, 18 aa, Artificial
  CDR sequence
YRRTYISSTYSESSEYDY

SEQ ID NO: 483 - protein, 18 aa, Artificial
  CDR sequence
YRRTYISSTYNESSEYDY

SEQ ID NO: 484 - protein, 18 aa, Artificial
  CDR sequence
YRRTYISSTYSESSEYDY

SEQ ID NO: 485 - protein, 18 aa, Artificial
  CDR sequence
YVRTPYYSSYYDSTKYEY

SEQ ID NO: 486 - protein, 18 aa, Artificial
  CDR sequence
YLRGPYYSSFYDSTKYEY

SEQ ID NO: 487 - protein, 18 aa, Artificial
  CDR sequence
YLRSPYYSSYYDSAKYEY

SEQ ID NO: 488 - protein, 18 aa, Artificial
  CDR sequence
YLRSPYYSSYYDSAKYEY

SEQ ID NO: 489 - protein, 18 aa, Artificial
  CDR sequence
YLRSPYYSSYYDSAKYEY

SEQ ID NO: 490 - protein, 18 aa, Artificial
  CDR sequence
YLRSPYYSSYYDSAKYEY

SEQ ID NO: 491 - protein, 18 aa, Artificial
  CDR sequence
YLRSPYYSSYYDSAKYEY

SEQ ID NO: 492 - protein, 18 aa, Artificial
  CDR sequence
YLRSPYYSSYYDSAKYEY

SEQ ID NO: 493 - protein, 18 aa, Artificial
  CDR sequence
YLRSPYYSSYYDSAKYEY

SEQ ID NO: 494 - protein, 18 aa, Artificial
  CDR sequence
GNREPYLRQYTASNPYDY

SEQ ID NO: 495 - protein, 18 aa, Artificial
  CDR sequence
GNREPYLRQYTASNPYDY

SEQ ID NO: 496 - protein, 17 aa, Artificial
  CDR sequence
TTPVTTYLPRSERQYDY

SEQ ID NO: 497 - protein, 17 aa, Artificial
  CDR sequence
TTPTTSYLPRSERQYEY

SEQ ID NO: 498 - protein, 11 aa, Artificial
  FR4 sequence
WGLGAQVTVSS

SEQ ID NO: 499 - protein, 11 aa, Artificial
  FR4 sequence
WGQGTQVTVSS

SEQ ID NO: 500 - protein, 11 aa, Artificial
  FR4 sequence
WGQGTQVTVSS

SEQ ID NO: 501 - protein, 11 aa, Artificial
  FR4 sequence
WGQGTQVTVSS

SEQ ID NO: 502 - protein, 11 aa, Artificial
  FR4 sequence
WGQGTQVTVSS

SEQ ID NO: 503 - protein, 11 aa, Artificial
  FR4 sequence
WGQGTQVTVSS

SEQ ID NO: 504 - protein, 11 aa, Artificial
  FR4 sequence
WGQGTQVTVSS

SEQ ID NO: 505 - protein, 11 aa, Artificial
  FR4 sequence
WGQGTQVTVSS

SEQ ID NO: 506 - protein, 11 aa, Artificial
  FR4 sequence
WGQGTQVTVSS

SEQ ID NO: 507 - protein, 11 aa, Artificial
  FR4 sequence
WGQGTQVTVSS

SEQ ID NO: 508 - protein, 11 aa, Artificial
  FR4 sequence
WGQGTQVTVSS

SEQ ID NO: 509 - protein, 11 aa, Artificial
  FR4 sequence
WGQGTQVTVSS

SEQ ID NO: 510 - protein, 11 aa, Artificial
  FR4 sequence
WGQGTQVTVSS

SEQ ID NO: 511 - protein, 11 aa, Artificial
  FR4 sequence
WGQGTQVTVSS

SEQ ID NO: 512 - protein, 11 aa, Artificial
  FR4 sequence
WGQGTQVTVSS

SEQ ID NO: 513 - protein, 11 aa, Artificial
  FR4 sequence
WGQGTQVTVSS

SEQ ID NO: 514 - protein, 11 aa, Artificial
  FR4 sequence
WGQGTQVTVSS

SEQ ID NO: 515 - protein, 11 aa, Artificial
  FR4 sequence
WGQGTQVTVSS

SEQ ID NO: 516 - protein, 11 aa, Artificial
  FR4 sequence
WGQGTQVTVSS

SEQ ID NO: 517 - protein, 11 aa, Artificial
  FR4 sequence
WGQGTQVTVSS

SEQ ID NO: 518 - protein, 11 aa, Artificial
  FR4 sequence
WGQGTQVTVSS

SEQ ID NO: 519 - protein, 11 aa, Artificial
  FR4 sequence
RGQGTQVTVSS

SEQ ID NO: 520 - protein, 11 aa, Artificial
  FR4 sequence
WGQETQVTVSS

SEQ ID NO: 521 - protein, 11 aa, Artificial
  FR4 sequence
WGQGTQVTVSS

SEQ ID NO: 522 - protein, 11 aa, Artificial
  FR4 sequence
WGQGTQVTVSS

SEQ ID NO: 523 - protein, 11 aa, Artificial
  FR4 sequence
WGQGTQVTVSS

SEQ ID NO: 524 - protein, 11 aa, Artificial
  FR4 sequence
WGQGTQVTVSS

SEQ ID NO: 525 - protein, 11 aa, Artificial
  FR4 sequence
WGQGTQVTVSS

SEQ ID NO: 526 - protein, 11 aa, Artificial
  FR4 sequence
WGQGTQVTVSS

SEQ ID NO: 527 - protein, 11 aa, Artificial
  FR4 sequence
WGQGTQVTVSS

SEQ ID NO: 528 - protein, 11 aa, Artificial
  FR4 sequence
WGQGTQVTVSS

SEQ ID NO: 529 - protein, 11 aa, Artificial
  FR4 sequence
WGQGTQVTVSS

SEQ ID NO: 530 - protein, 11 aa, Artificial
  FR4 sequence
WGQGTQVTVSS

SEQ ID NO: 531 - protein, 11 aa, Artificial
  FR4 sequence
WGQGTQVTVSS

SEQ ID NO: 532 - protein, 11 aa, Artificial
  FR4 sequence
WGQGTQVTVSS

SEQ ID NO: 533 - protein, 11 aa, Artificial
  FR4 sequence
WGQGTQVTVSS

SEQ ID NO: 534 - protein, 11 aa, Artificial
  FR4 sequence
WGQGTQVTVSS

SEQ ID NO: 535 - protein, 11 aa, Artificial
  FR4 sequence
WGQGTQVTVSS

SEQ ID NO: 536 - protein, 11 aa, Artificial
  FR4 sequence
WGQGTQVTVSS

SEQ ID NO: 537 - protein, 11 aa, Artificial
  FR4 sequence
WGQGTQVTVSS

SEQ ID NO: 538 - protein, 11 aa, Artificial
  FR4 sequence
WGQGTQVTVSS

SEQ ID NO: 539 - protein, 11 aa, Artificial
  FR4 sequence
WGQGTQVTVSS

SEQ ID NO: 540 - protein, 11 aa, Artificial
  FR4 sequence
WGQGTQVTVSS

SEQ ID NO: 541 - protein, 11 aa, Artificial
  FR4 sequence
WGQGTQVTVSS

SEQ ID NO: 542 - protein, 11 aa, Artificial
  FR4 sequence
WGQGTQVTVSS

SEQ ID NO: 543 - protein, 11 aa, Artificial
  FR4 sequence
WGQGTQVTVSS

SEQ ID NO: 544 - protein, 11 aa, Artificial
  FR4 sequence
WGQGTQVTVSS

SEQ ID NO: 545 - protein, 11 aa, Artificial
  FR4 sequence
WGQGTQVTVSS

SEQ ID NO: 546 - protein, 11 aa, Artificial
  FR4 sequence
WGQGTQVTVSS

SEQ ID NO: 547 - protein, 11 aa, Artificial
  FR4 sequence
WGQGTQVTVSS

SEQ ID NO: 548 - protein, 11 aa, Artificial
  FR4 sequence
WGQGTQVTVSS

SEQ ID NO: 549 - protein, 11 aa, Artificial
  FR4 sequence
WGQGTQVTVSS

SEQ ID NO: 550 - protein, 11 aa, Artificial
  FR4 sequence
WGQGTQVTVSS

SEQ ID NO: 551 - protein, 11 aa, Artificial
  FR4 sequence
WGQGTQVTVSS

SEQ ID NO: 552 - protein, 11 aa, Artificial
  FR4 sequence
WGQGTQVTVSS

SEQ ID NO: 553 - protein, 11 aa, Artificial
  FR4 sequence
WGQGTQVTVSS

SEQ ID NO: 554 - protein, 11 aa, Artificial
  FR4 sequence
WGQGTQVTVSS

SEQ ID NO: 555 - protein, 11 aa, Artificial
  FR4 sequence
WGQGTQVTVSS

SEQ ID NO: 556 - protein, 11 aa, Artificial
  FR4 sequence
WGQGTQVTVSS

SEQ ID NO: 557 - protein, 11 aa, Artificial
  FR4 sequence
WGQGTQVTVSS

SEQ ID NO: 558 - protein, 11 aa, Artificial
  FR4 sequence
WGQGTQVTVSS

SEQ ID NO: 559 - protein, 11 aa, Artificial
  FR4 sequence
WGQGTQVTVSS

SEQ ID NO: 560 - protein, 126 aa, Artificial
  Nanobody sequence
EVQLVESGGGLVQAGGSLRLSCAVSGRTFSSSTMAWFRQPPGGERDFVASISTSGTRTLYADSVKGRFTISRDNAKSTGYLQMNSLKPEDTAVYFCAAVNRRGWEFWRLASGYDYWGLGAQVTVSS

SEQ ID NO: 561 - protein, 120 aa, Artificial
  Nanobody sequence
EVQLVESGGGLVQPGGSLRLSCAASGFTFSSYYMSWVRQAPGKGLEWVSSIYSDGSTTDYADSVKGRFTISRDNAKNTLNLQMNSLKSEDTAVYYCAKDANSGGLEYDYWGQGTQVTVSS

SEQ ID NO: 562 - protein, 120 aa, Artificial
  Nanobody sequence
EVQLVESGGKLVQAGGSLRLSCAVSGRTSSIYNMAWFRQGPGKGRESVGRIYWSDDNTYYADSVKGRFTISRDNATNTVYLQMNSLKPEDTAVYYCAGKTTKWSLEYDYWGQGTQVTVSS

SEQ ID NO: 563 - protein, 125 aa, Artificial
  Nanobody sequence
KVQLVESGGGLVQTGDSLRLSCAASGRAIGSYAMGWFRQAPGKEREFVAVINYRGSSLKYADRVKGRFTISRDNAKNMVYLQMNSLKPDDTAVYYCAAQTSGADFGTTPQRYTYWGQGTQVTVSS

SEQ ID NO: 564 - protein, 124 aa, Artificial
  Nanobody sequence
EVQLVESGGGLVQAGGSLRLSCAASGRTIGGHTMAWFRQAPGKERDFVATITSSGSTIFYADSVKGRFTISRDNGKKTMTLEMDSLKPEDTAVYYCAARIRGKVTVDNFDYAYWGQGTQVTVSS

SEQ ID NO: 565 - protein, 122 aa, Artificial
  Nanobody sequence
EVQLVESGGGLMQTGGSLRLSCAASGVTYSYYTASWFRQAPGKEREFVAAISPSGNTYYADSVKGRFTISRDNGKHTMYLQMNSLNPEDTAVYFCAIRATDSIYYASSYRHWGQGTQVTVSS

SEQ ID NO: 566 - protein, 124 aa, Artificial
  Nanobody sequence
EVQLVESEGGPVQSGGSLRLSCAASGRTFSVSTIAWFRQAPGEGREFVAAIYPSGRNAYVADSVKGRFTISRDNAKKTVYLQMNSLKPEDTAAYYCAAHQPSGSYYSAEAYAYWGQGTQVTVSS

SEQ ID NO: 567 - protein, 127 aa, Artificial
  Nanobody sequence
EVQLVESGGGSVQPGGSLRLSCAASGGTFSRYAMGWFRQAPGKEREFVSAISVGGTYQYYVDSVKGRFTISRDNAESTVYLQMNSLKPEDTAVYYCAGDASPYGYLREYTATRFDYWGQGTQVTVSS

SEQ ID NO: 568 - protein, 127 aa, Artificial
  Nanobody sequence
EVQLVESGGGLVQAGGSLRLTCAASGRTFRSYAMGWFRQAPGKEREFVAAINYSGGSTNYADSVKGRFTISRDNAKNTLYLQMNSLEPEDTAVYYCAAGSGYASLSYYSTERAYTYWGQGTQVTVSS

SEQ ID NO: 569 - protein, 125 aa, Artificial
  Nanobody sequence
EVQLVESGGGLVQAGGSLRLSCAASGITFSSRTMGWFRQAPGKEREFVAAITPSSRTTYYADSVKGRFTISRDNAKNTVLLQMNSLKPEDTAVYYCAAERTYGSNYTRPTAWNYWGQGTQVTVSS

SEQ ID NO: 570 - protein, 125 aa, Artificial
  Nanobody sequence
EVQLVESGGGLVQAGGSLRLSCAASGRTFSSKTMGWFRQPPGNEREFVAAITPTSRTTYYADSVKGRFTISRDNAKNTVSLQMNSLKFEDTAAYYCVAVRRYGSPPHDGSSYEYWGQGTQVTVSS

SEQ ID NO: 571 - protein, 122 aa, Artificial
  Nanobody sequence
EVQLVESGGGWMQAGGSLRLSCAASGRTFTMAWFRQAPGKEREFVAAITGSGRSTYYTDSVKGRFTISRDNAKNTAYLQMKSLKPEDTAVYYCAGLRGLGLEYDSAKSYSYWGQGTQVTVSS

SEQ ID NO: 572 - protein, 126 aa, Artificial
  Nanobody sequence
EVQLVESGGGLVQAGGSLRLSCAASGRTFRSYPMGWFRQAPGKEREFVASITGSGGSTYYADSVKGRFTISRDNAKNTVYLQMNSLRPEDTAVYSCAAYIRPDTYLSRDYRKYDYWGQGTQVTVSS

SEQ ID NO: 573 - protein, 122 aa, Artificial
  Nanobody sequence
EVQLVESGGGLVQAGGSLRLSCAASGRTSSYYTMSWFRQDPGKEREFVAAVPLSGNTYYADPVRGRFTISRDNAKNTADLQMNSLKPEDTAVYYCAARASGSIYNRGSYAYWGQGTQVTVSS

SEQ ID NO: 574 - protein, 126 aa, Artificial
  Nanobody sequence
EVQLVESGGGLVQAGGSLRLSCAAAGGTFRNYVMGWFRQAPGKEREFVTAISTGGSWTGYVDSVKDRFTISRDNTKNTVYLQMASLKPEDTAVYYCAATTPATTYLPRSERQYDYWGQGTQVTVSS

SEQ ID NO: 575 - protein, 126 aa, Artificial
  Nanobody sequence
EVQLVESGGGLVQAGGSLRLSCVASRRTFSSYAMGWFRQVPGKERDFVAAISTGSITIYGDSVKGRFTISRDNAKNTVYLQMNSLKPEDTAVYYCAAGKREPYLRQYTASNPYDYWGQGTQVTVSS

SEQ ID NO: 576 - protein, 128 aa, Artificial
  Nanobody sequence
EVQLVESGGGLVQVGDSLRLSCEASGRSRFSTYVMGWFRQAPGKEREFVAAVSWSSGNAYYIDSAKGRFATSRDTAKNIMYLQMNSLKPEDTAVYTCAAGRGYGLLSEYTQAPRYDYWGQGTQVTVSS

SEQ ID NO: 577 - protein, 150 aa, Artificial
  Nanobody sequence
EVQLVESGGGLVQAGGSLRLSCAASGRTFSRSAMGWFRQAPGKEREFVGFITGSGGTTYYGESVKGRFTISRDNAQNPVYLQMNSLKPEDTAVYYCGVYRRTYISSTYSESSEYDYWGQGTQVTVSSAAAEQKLISEEDLNGAAHHHHHH

SEQ ID NO: 578 - protein, 124 aa, Artificial
  Nanobody sequence
EVQLVESGGGLVQAGDSLRLSCAASGRTVTMGWFRQAPGKEREFVASITGSGSVTNYADSVKGRFTISRDNAKNTVFLQMNSLKPEDTAVYYCAAYLPSPYYSSYYDSTKYEYWGQGTQVTVSS

SEQ ID NO: 579 - protein, 124 aa, Artificial
  Nanobody sequence
EVQLVESGGGLVQAGDSLRLSCAASGRTFTMGWFRQAPGTEREFVAAISGSGKITNYADSVKGRFTISRDHAKNTVFLQMDSLKPEDTAVYYCAGYLRSPYYSSFYDSAKYEYWGQGTQVTVSS

SEQ ID NO: 580 - protein, 126 aa, Artificial
  Nanobody sequence
EVQLVESGGGLVQAGGSLRLSCVASRRTFNSYAVGWFRQVPGEERDFVAAISTGSVTIYADSVKGRFTISRDNAKNTVYLQMNSLKPEDTAVYYCAAGNREPYLRQYTASNPYDYWGQGTQVTVSS

SEQ ID NO: 581 - protein, 125 aa, Artificial
  Nanobody sequence
EVQLVESGGGLMQTGGSLRLSCAASERTSRNYGMGWFRQAPGKEREFVAAITSAGGTTYYGDFVKGRFTISRDSAKYTVYLQMNSLKPEDTAVYWCAAKLQIGGRWHNLNDYGYRGQGTQVTVSS

SEQ ID NO: 582 - protein, 122 aa, Artificial
  Nanobody sequence
EVQLVESGGGLVQAGGSLRLSCAASGLTTVYTMAWFRQAPGKEREFVAAITRSGKTTYYADSVKGRFTISRDNAKNTVNLQMNSLKPDDTAVYYCAAKALLGMTNPAGYEYWGQETQVTVSS

SEQ ID NO: 583 - protein, 123 aa, Artificial
  Nanobody sequence
EVQLVEAGGGLVQAGDSLRLSCAASGRTIRGTMAWFRQAPGKDREFVATVTSSGSTTFYADSVKGRFTISRDNAENTVNLQMDSLKPEDTAVYYCAARIRGKVTPSNYDYAYWGQGTQVTVSS

SEQ ID NO: 584 - protein, 122 aa, Artificial
  Nanobody sequence
EVQLVESGGGWMQAGGSLRLSCAASGRTFTMAWFRQASGKEREFVAAITGSGRSTYYTDSVKGRFTISRDNAKNTAYLQMKSLKPEDTAVYYCAGLRGLGLEYDSAKSYSYWGQGTQVTVSS

SEQ ID NO: 585 - protein, 126 aa, Artificial
  Nanobody sequence
  misc_feature (3)..(3): Xaa can be any naturally occurring amino acid
EVXLVESGGGLVQAGGSLRLSCAASGRTFRSYPMGWFRQAPGKEREFVASITGSGGSTYYADSVKGRFTISRDNAKNTVYLQMNSLRPEDTAVYSCAAYIRPDTYLSRDYRKYDYWGQGTQVTVSS

SEQ ID NO: 586 - protein, 122 aa, Artificial
  Nanobody sequence
EVQLVESGGGLVQAGGSLRLSCAASGLTSSRYTMSWFRQDPGKEREFVAAVPLSGNTYYADPVRGRFTISRDNAKNTVDLQMNSLKPEDTAVYYCAARASGSIFNRGSYAYWGQGTQVTVSS

SEQ ID NO: 587 - protein, 122 aa, Artificial
  Nanobody sequence
EVQLVESGGGLVPAGGSLRLSCAASGLTDRRYTMSWFRQDPGKEREFVAAVPLSGNTYYADPVRGRFTISRDNAKNTVDLQMNSLKPEDTAVYYCAARASGSIFNRGSYAYWGQGTQVTVSS

SEQ ID NO: 588 - protein, 122 aa, Artificial; identical to SEQ ID NO: 587
  Nanobody sequence

SEQ ID NO: 589 - protein, 126 aa, Artificial
  Nanobody sequence
EVQLVESGGGLVQAGGSLRLSCAAAGGTFRNYVMGWFRQAPGKEREFVTAISTGGSWTGYVDSVKDRFTISRDNTKNTVYLQMASLKPEDTAVYYCAATMPATTYLPRSERQYDYWGQGTQVTVSS

SEQ ID NO: 590 - protein, 126 aa, Artificial
  Nanobody sequence
EVQLVESGGGLVQAGGSLTLSCAAAGFTFRRYVMGWFRQAPGKEREFVAAISTGGTWTGYVDSVKDRFTISRDNTKNTVYLQMASLKPEDTAVYNCAATTPTTSYLPRSERQYEYWGQGTQVTVSS

SEQ ID NO: 591 - protein, 126 aa, Artificial
  Nanobody sequence
EVQLVESGGGLVQAGGSLRLSCAAAGCTFRNYVMGWFRQAPGKEREFVTAISTGGTWTGYVDSVKDRFTISRDNTKNTVNLQMASLKPEDTAVYYCAATTPTTSYLPRSERQYEYWGQGTQVTVSS

SEQ ID NO: 592 - protein, 126 aa, Artificial
  Nanobody sequence
EVQLVESGGGLVQAGGSLRLSCAAAGGTFRNYVMGWFRQAPGKEREFVAAISTGGSWTGYVDSVKDRFTISRDNTKNTVYLQMVSLKPEDTAVYYCAATTPATTYLPRSERQYDYWGQGTQVTVSS

SEQ ID NO: 593 - protein, 126 aa, Artificial
  Nanobody sequence
EVQLVESGGGLVQAGGSLRLSCAAAGGTFRNYVMGWFRQAPGKEREFVTAISAGGSWTGYVDSVKDRFTISRDNTKNTVYLQMASLKPEDTAVYYCAATTPATTYLPRSERQYDYWGQGTQVTVSS

SEQ ID NO: 594 - protein, 126 aa, Artificial
  Nanobody sequence
EVQLVESGGGLVQAGGSLRLSCAAAGYTFRAYVMGWFRQAPGKEREFVAGISTGGTWTGYVDSVKDRFTISRDNTKNTVYLQMASLKPEDTAVYYCAATTPVTSYLPRSERQYEHWGQGTQVTVSS

SEQ ID NO: 595 - protein, 128 aa, Artificial
  Nanobody sequence
EVQLVESGGGLVQSGGSLRLSCAAAGYTFRARAYVMGWFRQAPGKEREFVAAISTGGTWTGYVDSVKDRFTISRDNTKNTMYLQMASLKPEDTAVYYCAATTPSTSYLPRSERQYEYWGQGTQVTVSS

SEQ ID NO: 596 - protein, 126 aa, Artificial; identical to SEQ ID NO: 575
  Nanobody sequence

SEQ ID NO: 597 - protein, 126 aa, Artificial
  Nanobody sequence
EVQLVESGGGLVQAGGSLRLSCVASKRTFASYAMGWFRQVPGKERDFVAAITTGSITIYADSVKGRFAISRDNAKNTVYLQMNSLKPEDTAVYYCAAGNREPYLRQYTASNPYDYWGQGTQVTVSS

SEQ ID NO: 598 - protein, 128 aa, Artificial; identical to SEQ ID NO: 576
  Nanobody sequence

SEQ ID NO: 599 - protein, 128 aa, Artificial
  Nanobody sequence
EVQLVESGGGLVQVGDSLRLSCEASGRSRFSTYVMGWFRQAPGKEREFVAAISWSSGNAYYIDSAKGRFATSRDTAKNIMYLQMNSLKPEDTAVYSCAAGRGYGLLSEYTQAARYDYWGQGTQVTVSS

SEQ ID NO: 600 - protein, 127 aa, Artificial
  Nanobody sequence
EVQLVESGGGLVQAGGSLRLSCAASGRTFSRSAMGWFRQAPGKEREFVGFITGSGGTTYYGESVKGRFTISRDNAQNPVYLQMNSLKPEDTAVYYCGVYRRTYISSTYSESSEYDYWGQGTQVTVSS

SEQ ID NO: 601 - protein, 127 aa, Artificial
  Nanobody sequence
EVQLVESGGGLVQAGGSLRLSCAASGRTFSRSAMGWFRQAPGKEREFVGFITGSGGTTYYGESVKGRFTISRDNAQNPVYLQMNSLKPEDTAVYYCAVYRRTYISSTYNESSEYDYWGQGTQVTVSS

SEQ ID NO: 602 - protein, 127 aa, Artificial; identical to SEQ ID NO: 600
  Nanobody sequence

SEQ ID NO: 603 - protein, 127 aa, Artificial
  Nanobody sequence
EVQLVESGGGLVQAGGSLRLSCAASGRTFSRSAMGWFRQAPGKEREFVGFITGSGGTTYYGESVKGRFTISRDNAQNPVYLQMNSLKPEDTAVYYCGVYRRTYISITYSESSDYDYWGQGTQVTVSS

SEQ ID NO: 604 - protein, 127 aa, Artificial
  Nanobody sequence
EVQLVESGGGLVQAGGSLRLSCAASGRTFSISAMGWFRQAPGKEREFVCFITGSGGTTYYGESVKGRFTISRDNAQNPVYLQMNSLKPEDTAVYYCGVYRRTYISSTYSESSEYDYWGQGTQVTVSS

SEQ ID NO: 605 - protein, 127 aa, Artificial; identical to SEQ ID NO: 600
  Nanobody sequence

SEQ ID NO: 606 - protein, 127 aa, Artificial; identical to SEQ ID NO: 600
  Nanobody sequence

SEQ ID NO: 607 - protein, 127 aa, Artificial; identical to SEQ ID NO: 601
  Nanobody sequence

SEQ ID NO: 608 - protein, 127 aa, Artificial; identical to SEQ ID NO: 600
  Nanobody sequence

SEQ ID NO: 609 - protein, 124 aa, Artificial
  Nanobody sequence
EVQLVESGGGLVQAGDSLRLSCAASGRIFTMGWFRQAPGKEREFVAAISGSGSITNYADSVKGRFTISRDYAKTTVFLQMNSLKPEDTAVYYCAAYVRTPYYSSYYDSTKYEYWGQGTQVTVSS

SEQ ID NO: 610 - protein, 124 aa, Artificial
  Nanobody sequence
EVQLVESGGGLVQAGDSLRLSCAASGRTFTMGWFRQAPGKEREFVAFISGSGSVTNYTDSVKGRFTISRDHAKNTVFLQMNSLKPEDTAVYYCAAYLRGPYYSSFYDSTKYEYWGQGTQVTVSS

SEQ ID NO: 611 - protein, 124 aa, Artificial
  Nanobody sequence
EVQLVESGGGLVQAGDSLRLSCAASGRTFTMGWFRRAPGTEREFVASISGSGKITNYADSVKGRFTISRDHAKNAVFLQMDGLKPEDTAVYYCAAYLRSPYYSSYYDSAKYEYWGQGTQVTVSS

SEQ ID NO: 612 - protein, 124 aa, Artificial
  Nanobody sequence
EVQLVESGGGSVQAGDSLRLSCAASGRTFTMGWFRQAPGTEREFVAAISGSGKITNYADSVKGRFTISRDHAMNTVFLQMDSLKPEDTAVYYCAAYLRSPYYSSYYDSAKYEYWGQGTQVTVSS

SEQ ID NO: 613 - protein, 124 aa, Artificial
  Nanobody sequence
EVQLVESGGGLVQAGDSLRLSCAASGRTFTMGWFRQAPGTEREFVAAISGSGKITNYADSVKGRFTISRDHAKNTVFLQMDSLKPEDTAVYYCAAYLRSPYYSSYYDSAKYEYWGQGTQVTVSS

SEQ ID NO: 614 - protein, 124 aa, Artificial; identical to SEQ ID NO: 613
  Nanobody sequence

SEQ ID NO: 615 - protein, 124 aa, Artificial; identical to SEQ ID NO: 613
  Nanobody sequence

SEQ ID NO: 616 - protein, 124 aa, Artificial; identical to SEQ ID NO: 613
  Nanobody sequence

SEQ ID NO: 617 - protein, 124 aa, Artificial; identical to SEQ ID NO: 613
  Nanobody sequence

SEQ ID NO: 618 - protein, 126 aa, Artificial
  Nanobody sequence
EMQLVESGGGLVQAGGSLRLSCVASKRTFASYAMGWFRQVPGKERDFVAAISTHSITVYADSVKGRFTISRDNAKNTVYLQMNTLKPEDTAVYYCAAGNREPYLRQYTASNPYDYWGQGTQVTVSS

SEQ ID NO: 619 - protein, 126 aa, Artificial
  Nanobody sequence
EVQLVESGGGLVQTGGSLRLSCVASRRTFSSYAVGWFRQVPGKERDFVAAISTGSVTIYADSVKGRFTISRDNTKNTVYLQMNSLKPEDTAVYYCAAGNREPYLRQYTASNPYDYWGQGTQVTVSS

SEQ ID NO: 620 - protein, 126 aa, Artificial
  Nanobody sequence
EVQLVESGGGLVQAGGSLRLSCAAAGGTFRNYVMGWFRQAPGKEREFVTAISTGGSWTGYVDSVKDRFTISRDNTKNTVYLHMASLKPEDTAVYYCAATTPVTTYLPRSERQYDYWGQGTQVTVSS

SEQ ID NO: 621 - protein, 126 aa, Artificial
  Nanobody sequence
EVQLVESGGGLVQAGDSLRLSCAAAGFTFRRYVMGWFRQAPGKEREFVAAISTGGTWTGYVDSVKDRFTISRDNTKNTVYLQMASLKPEDTAVYNCAATTPTTSYLPRSERQYEYWGQGTQVTVSS

SEQ ID NO: 622 - protein, 249 aa, Artificial
  Nanobody sequence
EVQLVESGGKLVQAGGSLRLSCAVSGRTSSIYNMAWFRQGPGKGRESVGRIYWSDDNTYYADSVKGRFTISRDNATNTVYLQMNSLKPEDTAVYYCAGKTTKWSLEYDYWGQGTQVTVSSGGGGSGGGSEVQLVESGGKLVQAGGSLRLSCAVSGRTSSIYNMAWFRQGPGKGRESVGRIYWSDDNTYYADSVKGRFTISRDNATNTVYLQMNSLKPEDTAVYYCAGKTTKWSLEYDYWGQGTQVTVSS

SEQ ID NO: 623 - protein, 251 aa, Artificial
  Nanobody sequence
EVQLVESGGKLVQAGGSLRLSCAVSGRTSSIYNMAWFRQGPGKGRESVGRIYWSDDNTYYADSVKGRFTISRDNATNTVYLQMNSLKPEDTAVYYCAGKTTKWSLEYDYWGQGTQVTVSSGGGGSGGGSEVQLVESGGGLMQTGGSLRLSCAASGVTYSYYTASWFRQAPGKEREFVAAISPSGNTYYADSVKGRFTISRDNGKHTMYLQMNSLNPEDTAVYFCAIRATDSIYYASSYRHWGQGTQVTVSS

SEQ ID NO: 624 - protein, 256 aa, Artificial
  Nanobody sequence
EVQLVESGGKLVQAGGSLRLSCAVSGRTSSIYNMAWFRQGPGKGRESVGRIYWSDDNTYYADSVKGRFTISRDNATNTVYLQMNSLKPEDTAVYYCAGKTTKWSLEYDYWGQGTQVTVSSGGGGSGGGSEVQLVESGGGLVQAGGSLRLTCAASGRTFRSYAMGWFRQAPGKEREFVAAINYSGGSTNYADSVKGRFTISRDNAKNTLYLQMNSLEPEDTAVYYCAAGSGYASLSYYSTERAYTYWGQGTQVTVSS

SEQ ID NO: 625 - protein, 255 aa, Artificial
  Nanobody sequence
EVQLVESGGKLVQAGGSLRLSCAVSGRTSSIYNMAWFRQGPGKGRESVGRIYWSDDNTYYADSVKGRFTISRDNATNTVYLQMNSLKPEDTAVYYCAGKTTKWSLEYDYWGQGTQVTVSSGGGGSGGGSEVQLVESGGGLVQAGGSLRLSCAASGRTFRSYPMGWFRQAPGKEREFVASITGSGGSTYYADSVKGRFTISRDNAKNTVYLQMNSLRPEDTAVYSCAAYIRPDTYLSRDYRKYDYWGQGTQVTVSS

SEQ ID NO: 626 - protein, 255 aa, Artificial
  Nanobody sequence
EVQLVESGGKLVQAGGSLRLSCAVSGRTSSIYNMAWFRQGPGKGRESVGRIYWSDDNTYYADSVKGRFTISRDNATNTVYLQMNSLKPEDTAVYYCAGKTTKWSLEYDYWGQGTQVTVSSGGGGSGGGSEVQLVESGGGLVQAGGSLRLSCAAAGGTFRNYVMGWFRQAPGKEREFVTAISTGGSWTGYVDSVKDRFTISRDNTKNTVYLQMASLKPEDTAVYYCAATTPATTYLPRSERQYDYWGQGTQVTVSS

SEQ ID NO: 627 - protein, 256 aa, Artificial
  Nanobody sequence
EVQLVESGGKLVQAGGSLRLSCAVSGRTSSIYNMAWFRQGPGKGRESVGRIYWSDDNTYYADSVKGRFTISRDNATNTVYLQMNSLKPEDTAVYYCAGKTTKWSLEYDYWGQGTQVTVSSGGGGSGGGSEVQLVESGGGLVQAGGSLRLSCAASGRTFSRSAMGWFRQAPGKEREFVGFITGSGGTTYYGESVKGRFTISRDNAQNPVYLQMNSLKPEDTAVYYCGVYRRTYISSTYSESSEYDYWGQGTQVTVSS

SEQ ID NO: 628 - protein, 251 aa, Artificial
  Nanobody sequence
EVQLVESGGGLMQTGGSLRLSCAASGVTYSYYTASWFRQAPGKEREFVAAISPSGNTYYADSVKGRFTISRDNGKHTMYLQMNSLNPEDTAVYFCAIRATDSIYYASSYRHWGQGTQVTVSSGGGGSGGGSEVQLVESGGKLVQAGGSLRLSCAVSGRTSSIYNMAWFRQGPGKGRESVGRIYWSDDNTYYADSVKGRFTISRDNATNTVYLQMNSLKPEDTAVYYCAGKTTKWSLEYDYWGQGTQVTVSS

SEQ ID NO: 629 - protein, 253 aa, Artificial
  Nanobody sequence
EVQLVESGGGLMQTGGSLRLSCAASGVTYSYYTASWFRQAPGKEREFVAAISPSGNTYYADSVKGRFTISRDNGKHTMYLQMNSLNPEDTAVYFCAIRATDSIYYASSYRHWGQGTQVTVSSGGGGSGGGSEVQLVESGGGLMQTGGSLRLSCAASGVTYSYYTASWFRQAPGKEREFVAAISPSGNTYYADSVKGRFTISRDNGKHTMYLQMNSLNPEDTAVYFCAIRATDSIYYASSYRHWGQGTQVTVSS

SEQ ID NO: 630 - protein, 258 aa, Artificial
  Nanobody sequence
EVQLVESGGGLMQTGGSLRLSCAASGVTYSYYTASWFRQAPGKEREFVAAISPSGNTYYADSVKGRFTISRDNGKHTMYLQMNSLNPEDTAVYFCAIRATDSIYYASSYRHWGQGTQVTVSSGGGGSGGGSEVQLVESGGGLVQAGGSLRLTCAASGRTFRSYAMGWFRQAPGKEREFVAAINYSGGSTNYADSVKGRFTISRDNAKNTLYLQMNSLEPEDTAVYYCAAGSGYASLSYYSTERAYTYWGQGTQVTVSS

SEQ ID NO: 631 - protein, 257 aa, Artificial
  Nanobody sequence
EVQLVESGGGLMQTGGSLRLSCAASGVTYSYYTASWFRQAPGKEREFVAAISPSGNTYYADSVKGRFTISRDNGKHTMYLQMNSLNPEDTAVYFCAIRATDSIYYASSYRHWGQGTQVTVSSGGGGSGGGSEVQLVESGGGLVQAGGSLRLSCAASGRTFRSYPMGWFRQAPGKEREFVASITGSGGSTYYADSVKGRFTISRDNAKNTVYLQMNSLRPEDTAVYSCAAYIRPDTYLSRDYRKYDYWGQGTQVTVSS

SEQ ID NO: 632 - protein, 257 aa, Artificial
  Nanobody sequence
EVQLVESGGGLMQTGGSLRLSCAASGVTYSYYTASWFRQAPGKEREFVAAISPSGNTYYADSVKGRFTISRDNGKHTMYLQMNSLNPEDTAVYFCAIRATDSIYYASSYRHWGQGTQVTVSSGGGGSGGGSEVQLVESGGGLVQAGGSLRLSCAAAGGTFRNYVMGWFRQAPGKEREFVTAISTGGSWTGYVDSVKDRFTISRDNTKNTVYLQMASLKPEDTAVYYCAATTPATTYLPRSERQYDYWGQGTQVTVSS

SEQ ID NO: 633 - protein, 258 aa, Artificial
  Nanobody sequence
EVQLVESGGGLMQTGGSLRLSCAASGVTYSYYTASWFRQAPGKEREFVAAISPSGNTYYADSVKGRFTISRDNGKHTMYLQMNSLNPEDTAVYFCAIRATDSIYYASSYRHWGQGTQVTVSSGGGGSGGGSEVQLVESGGGLVQAGGSLRLSCAASGRTFSRSAMGWFRQAPGKEREFVGFITGSGGTTYYGESVKGRFTISRDNAQNPVYLQMNSLKPEDTAVYYCGVYRRTYISSTYSESSEYDYWGQGTQVTVSS

SEQ ID NO: 634 - protein, 256 aa, Artificial
  Nanobody sequence
EVQLVESGGGLVQAGGSLRLTCAASGRTFRSYAMGWFRQAPGKEREFVAAINYSGGSTNYADSVKGRFTISRDNAKNTLYLQMNSLEPEDTAVYYCAAGSGYASLSYYSTERAYTYWGQGTQVTVSSGGGGSGGGSEVQLVESGGKLVQAGGSLRLSCAVSGRTSSIYNMAWFRQGPGKGRESVGRIYWSDDNTYYADSVKGRFTISRDNATNTVYLQMNSLKPEDTAVYYCAGKTTKWSLEYDYWGQGTQVTVSS

SEQ ID NO: 635 - protein, 258 aa, Artificial
  Nanobody sequence
EVQLVESGGGLVQAGGSLRLTCAASGRTFRSYAMGWFRQAPGKEREFVAAINYSGGSTNYADSVKGRFTISRDNAKNTLYLQMNSLEPEDTAVYYCAAGSGYASLSYYSTERAYTYWGQGTQVTVSSGGGGSGGGSEVQLVESGGGLMQTGGSLRLSCAASGVTYSYYTASWFRQAPGKEREFVAAISPSGNTYYADSVKGRFTISRDNGKHTMYLQMNSLNPEDTAVYFCAIRATDSIYYASSYRHWGQGTQVTVSS

SEQ ID NO: 636 - protein, 263 aa, Artificial
  Nanobody sequence
EVQLVESGGGLVQAGGSLRLTCAASGRTFRSYAMGWFRQAPGKEREFVAAINYSGGSTNYADSVKGRFTISRDNAKNTLYLQMNSLEPEDTAVYYCAAGSGYASLSYYSTERAYTYWGQGTQVTVSSGGGGSGGGSEVQLVESGGGLVQAGGSLRLTCAASGRTFRSYAMGWFRQAPGKEREFVAAINYSGGSTNYADSVKGRFTISRDNAKNTLYLQMNSLEPEDTAVYYCAAGSGYASLSYYSTERAYTYWGQGTQVTVSS

SEQ ID NO: 637 - protein, 262 aa, Artificial
  Nanobody sequence
EVQLVESGGGLVQAGGSLRLTCAASGRTFRSYAMGWFRQAPGKEREFVAAINYSGGSTNYADSVKGRFTISRDNAKNTLYLQMNSLEPEDTAVYYCAAGSGYASLSYYSTERAYTYWGQGTQVTVSSGGGGSGGGSEVQLVESGGGLVQAGGSLRLSCAASGRTFRSYPMGWFRQAPGKEREFVASITGSGGSTYYADSVKGRFTISRDNAKNTVYLQMNSLRPEDTAVYSCAAYIRPDTYLSRDYRKYDYWGQGTQVTVSS

SEQ ID NO: 638 - protein, 262 aa, Artificial
  Nanobody sequence
EVQLVESGGGLVQAGGSLRLTCAASGRTFRSYAMGWFRQAPGKEREFVAAINYSGGSTNYADSVKGRFTISRDNAKNTLYLQMNSLEPEDTAVYYCAAGSGYASLSYYSTERAYTYWGQGTQVTVSSGGGGSGGGSEVQLVESGGGLVQAGGSLRLSCAAAGGTFRNYVMGWFRQAPGKEREFVTAISTGGSWTGYVDSVKDRFTISRDNTKNTVYLQMASLKPEDTAVYYCAATTPATTYLPRSERQYDYWGQGTQVTVSS

SEQ ID NO: 639 - protein, 263 aa, Artificial
  Nanobody sequence
EVQLVESGGGLVQAGGSLRLTCAASGRTFRSYAMGWFRQAPGKEREFVAAINYSGGSTNYADSVKGRFTISRDNAKNTLYLQMNSLEPEDTAVYYCAAGSGYASLSYYSTERAYTYWGQGTQVTVSSGGGGSGGGSEVQLVESGGGLVQAGGSLRLSCAASGRTFSRSAMGWFRQAPGKEREFVGFITGSGGTTYYGESVKGRFTISRDNAQNPVYLQMNSLKPEDTAVYYCGVYRRTYISSTYSESSEYDYWGQGTQVTVSS

SEQ ID NO: 640 - protein, 255 aa, Artificial
  Nanobody sequence
EVQLVESGGGLVQAGGSLRLSCAASGRTFRSYPMGWFRQAPGKEREFVASITGSGGSTYYADSVKGRFTISRDNAKNTVYLQMNSLRPEDTAVYSCAAYIRPDTYLSRDYRKYDYWGQGTQVTVSSGGGGSGGGSEVQLVESGGKLVQAGGSLRLSCAVSGRTSSIYNMAWFRQGPGKGRESVGRIYWSDDNTYYADSVKGRFTISRDNATNTVYLQMNSLKPEDTAVYYCAGKTTKWSLEYDYWGQGTQVTVSS

SEQ ID NO: 641 - protein, 257 aa, Artificial
  Nanobody sequence
EVQLVESGGGLVQAGGSLRLSCAASGRTFRSYPMGWFRQAPGKEREFVASITGSGGSTYYADSVKGRFTISRDNAKNTVYLQMNSLRPEDTAVYSCAAYIRPDTYLSRDYRKYDYWGQGTQVTVSSGGGGSGGGSEVQLVESGGGLMQTGGSLRLSCAASGVTYSYYTASWFRQAPGKEREFVAAISPSGNTYYADSVKGRFTISRDNGKHTMYLQMNSLNPEDTAVYFCAIRATDSIYYASSYRHWGQGTQVTVSS

SEQ ID NO: 642 - protein, 262 aa, Artificial
  Nanobody sequence
EVQLVESGGGLVQAGGSLRLSCAASGRTFRSYPMGWFRQAPGKEREFVASITGSGGSTYYADSVKGRFTISRDNAKNTVYLQMNSLRPEDTAVYSCAAYIRPDTYLSRDYRKYDYWGQGTQVTVSSGGGGSGGGSEVQLVESGGGLVQAGGSLRLTCAASGRTFRSYAMGWFRQAPGKEREFVAAINYSGGSTNYADSVKGRFTISRDNAKNTLYLQMNSLEPEDTAVYYCAAGSGYASLSYYSTERAYTYWGQGTQVTVSS

SEQ ID NO: 643 - protein, 261 aa, Artificial
  Nanobody sequence
EVQLVESGGGLVQAGGSLRLSCAASGRTFRSYPMGWFRQAPGKEREFVASITGSGGSTYYADSVKGRFTISRDNAKNTVYLQMNSLRPEDTAVYSCAAYIRPDTYLSRDYRKYDYWGQGTQVTVSSGGGGSGGGSEVQLVESGGGLVQAGGSLRLSCAASGRTFRSYPMGWFRQAPGKEREFVASITGSGGSTYYADSVKGRFTISRDNAKNTVYLQMNSLRPEDTAVYSCAAYIRPDTYLSRDYRKYDYWGQGTQVTVSS

SEQ ID NO: 644 - protein, 261 aa, Artificial
  Nanobody sequence
EVQLVESGGGLVQAGGSLRLSCAASGRTFRSYPMGWFRQAPGKEREFVASITGSGGSTYYADSVKGRFTISRDNAKNTVYLQMNSLRPEDTAVYSCAAYIRPDTYLSRDYRKYDYWGQGTQVTVSSGGGGSGGGSEVQLVESGGGLVQAGGSLRLSCAAAGGTFRNYVMGWFRQAPGKEREFVTAISTGGSWTGYVDSVKDRFTISRDNTKNTVYLQMASLKPEDTAVYYCAATTPATTYLPRSERQYDYWGQGTQVTVSS

SEQ ID NO: 645 - protein, 262 aa, Artificial
  Nanobody sequence
EVQLVESGGGLVQAGGSLRLSCAASGRTFRSYPMGWFRQAPGKEREFVASITGSGGSTYYADSVKGRFTISRDNAKNTVYLQMNSLRPEDTAVYSCAAYIRPDTYLSRDYRKYDYWGQGTQVTVSSGGGGSGGGSEVQLVESGGGLVQAGGSLRLSCAASGRTFSRSAMGWFRQAPGKEREFVGFITGSGGTTYYGESVKGRFTISRDNAQNPVYLQMNSLKPEDTAVYYCGVYRRTYISSTYSESSEYDYWGQGTQVTVSS

SEQ ID NO: 646 - protein, 255 aa, Artificial
  Nanobody sequence
EVQLVESGGGLVQAGGSLRLSCAAAGGTFRNYVMGWFRQAPGKEREFVTAISTGGSWTGYVDSVKDRFTISRDNTKNTVYLQMASLKPEDTAVYYCAATTPATTYLPRSERQYDYWGQGTQVTVSSGGGGSGGGSEVQLVESGGKLVQAGGSLRLSCAVSGRTSSIYNMAWFRQGPGKGRESVGRIYWSDDNTYYADSVKGRFTISRDNATNTVYLQMNSLKPEDTAVYYCAGKTTKWSLEYDYWGQGTQVTVSS

SEQ ID NO: 647 - protein, 257 aa, Artificial
  Nanobody sequence
EVQLVESGGGLVQAGGSLRLSCAAAGGTFRNYVMGWFRQAPGKEREFVTAISTGGSWTGYVDSVKDRFTISRDNTKNTVYLQMASLKPEDTAVYYCAATTPATTYLPRSERQYDYWGQGTQVTVSSGGGGSGGGSEVQLVESGGGLMQTGGSLRLSCAASGVTYSYYTASWFRQAPGKEREFVAAISPSGNTYYADSVKGRFTISRDNGKHTMYLQMNSLNPEDTAVYFCAIRATDSIYYASSYRHWGQGTQVTVSS

SEQ ID NO: 648 - protein, 262 aa, Artificial
  Nanobody sequence
EVQLVESGGGLVQAGGSLRLSCAAAGGTFRNYVMGWFRQAPGKEREFVTAISTGGSWTGYVDSVKDRFTISRDNTKNTVYLQMASLKPEDTAVYYCAATTPATTYLPRSERQYDYWGQGTQVTVSSGGGGSGGGSEVQLVESGGGLVQAGGSLRLTCAASGRTFRSYAMGWFRQAPGKEREFVAAINYSGGSTNYADSVKGRFTISRDNAKNTLYLQMNSLEPEDTAVYYCAAGSGYASLSYYSTERAYTYWGQGTQVTVSS

SEQ ID NO: 649 - protein, 261 aa, Artificial
  Nanobody sequence
EVQLVESGGGLVQAGGSLRLSCAAAGGTFRNYVMGWFRQAPGKEREFVTAISTGGSWTGYVDSVKDRFTISRDNTKNTVYLQMASLKPEDTAVYYCAATTPATTYLPRSERQYDYWGQGTQVTVSSGGGGSGGGSEVQLVESGGGLVQAGGSLRLSCAASGRTFRSYPMGWFRQAPGKEREFVASITGSGGSTYYADSVKGRFTISRDNAKNTVYLQMNSLRPEDTAVYSCAAYIRPDTYLSRDYRKYDYWGQGTQVTVSS

SEQ ID NO: 650 - protein, 261 aa, Artificial
  Nanobody sequence
EVQLVESGGGLVQAGGSLRLSCAAAGGTFRNYVMGWFRQAPGKEREFVTAISTGGSWTGYVDSVKDRFTISRDNTKNTVYLQMASLKPEDTAVYYCAATTPATTYLPRSERQYDYWGQGTQVTVSSGGGGSGGGSEVQLVESGGGLVQAGGSLRLSCAAAGGTFRNYVMGWFRQAPGKEREFVTAISTGGSWTGYVDSVKDRFTISRDNTKNTVYLQMASLKPEDTAVYYCAATTPATTYLPRSERQYDYWGQGTQVTVSS

SEQ ID NO: 651 - protein, 262 aa, Artificial
  Nanobody sequence
EVQLVESGGGLVQAGGSLRLSCAAAGGTFRNYVMGWFRQAPGKEREFVTAISTGGSWTGYVDSVKDRFTISRDNTKNTVYLQMASLKPEDTAVYYCAATTPATTYLPRSERQYDYWGQGTQVTVSSGGGGSGGGSEVQLVESGGGLVQAGGSLRLSCAASGRTFSRSAMGWFRQAPGKEREFVGFITGSGGTTYYGESVKGRFTISRDNAQNPVYLQMNSLKPEDTAVYYCGVYRRTYISSTYSESSEYDYWGQGTQVTVSS

SEQ ID NO: 652 - protein, 256 aa, Artificial
  Nanobody sequence
EVQLVESGGGLVQAGGSLRLSCAASGRTFSRSAMGWFRQAPGKEREFVGFITGSGGTTYYGESVKGRFTISRDNAQNPVYLQMNSLKPEDTAVYYCGVYRRTYISSTYSESSEYDYWGQGTQVTVSSGGGGSGGGSEVQLVESGGKLVQAGGSLRLSCAVSGRTSSIYNMAWFRQGPGKGRESVGRIYWSDDNTYYADSVKGRFTISRDNATNTVYLQMNSLKPEDTAVYYCAGKTTKWSLEYDYWGQGTQVTVSS

SEQ ID NO: 653 - protein, 258 aa, Artificial
  Nanobody sequence
EVQLVESGGGLVQAGGSLRLSCAASGRTFSRSAMGWFRQAPGKEREFVGFITGSGGTTYYGESVKGRFTISRDNAQNPVYLQMNSLKPEDTAVYYCGVYRRTYISSTYSESSEYDYWGQGTQVTVSSGGGGSGGGSEVQLVESGGGLMQTGGSLRLSCAASGVTYSYYTASWFRQAPGKEREFVAAISPSGNTYYADSVKGRFTISRDNGKHTMYLQMNSLNPEDTAVYFCAIRATDSIYYASSYRHWGQGTQVTVSS

SEQ ID NO: 654 - protein, 263 aa, Artificial
  Nanobody sequence
EVQLVESGGGLVQAGGSLRLSCAASGRTFSRSAMGWFRQAPGKEREFVGFITGSGGTTYYGESVKGRFTISRDNAQNPVYLQMNSLKPEDTAVYYCGVYRRTYISSTYSESSEYDYWGQGTQVTVSSGGGGSGGGSEVQLVESGGGLVQAGGSLRLTCAASGRTFRSYAMGWFRQAPGKEREFVAAINYSGGSTNYADSVKGRFTISRDNAKNTLYLQMNSLEPEDTAVYYCAAGSGYASLSYYSTERAYTYWGQGTQVTVSS

SEQ ID NO: 655 - protein, 262 aa, Artificial
  Nanobody sequence
EVQLVESGGGLVQAGGSLRLSCAASGRTFSRSAMGWFRQAPGKEREFVGFITGSGGTTYYGESVKGRFTISRDNAQNPVYLQMNSLKPEDTAVYYCGVYRRTYISSTYSESSEYDYWGQGTQVTVSSGGGGSGGGSEVQLVESGGGLVQAGGSLRLSCAASGRTFRSYPMGWFRQAPGKEREFVASITGSGGSTYYADSVKGRFTISRDNAKNTVYLQMNSLRPEDTAVYSCAAYIRPDTYLSRDYRKYDYWGQGTQVTVSS

SEQ ID NO: 656 - protein, 262 aa, Artificial
  Nanobody sequence
EVQLVESGGGLVQAGGSLRLSCAASGRTFSRSAMGWFRQAPGKEREFVGFITGSGGTTYYGESVKGRFTISRDNAQNPVYLQMNSLKPEDTAVYYCGVYRRTYISSTYSESSEYDYWGQGTQVTVSSGGGGSGGGSEVQLVESGGGLVQAGGSLRLSCAAAGGTFRNYVMGWFRQAPGKEREFVTAISTGGSWTGYVDSVKDRFTISRDNTKNTVYLQMASLKPEDTAVYYCAATTPATTYLPRSERQYDYWGQGTQVTVSS

SEQ ID NO: 657 - protein, 263 aa, Artificial
  Nanobody sequence
EVQLVESGGGLVQAGGSLRLSCAASGRTFSRSAMGWFRQAPGKEREFVGFITGSGGTTYYGESVKGRFTISRDNAQNPVYLQMNSLKPEDTAVYYCGVYRRTYISSTYSESSEYDYWGQGTQVTVSSGGGGSGGGSEVQLVESGGGLVQAGGSLRLSCAASGRTFSRSAMGWFRQAPGKEREFVGFITGSGGTTYYGESVKGRFTISRDNAQNPVYLQMNSLKPEDTAVYYCGVYRRTYISSTYSESSEYDYWGQGTQVTVSS

SEQ ID NO: 658 - protein, 260 aa, Artificial
  Nanobody sequence
EVQLVESGGKLVQAGGSLRLSCAVSGRTSSIYNMAWFRQGPGKGRESVGRIYWSDDNTYYADSVKGRFTISRDNATNTVYLQMNSLKPEDTAVYYCAGKTTKWSLEYDYWGQGTQVTVSSGGGGSGGGGSGGGGSGGGGSEVQLVESGGKLVQAGGSLRLSCAVSGRTSSIYNMAWFRQGPGKGRESVGRIYWSDDNTYYADSVKGRFTISRDNATNTVYLQMNSLKPEDTAVYYCAGKTTKWSLEYDYWGQGTQVTVSS

SEQ ID NO: 659 - protein, 262 aa, Artificial
  Nanobody sequence
EVQLVESGGKLVQAGGSLRLSCAVSGRTSSIYNMAWFRQGPGKGRESVGRIYWSDDNTYYADSVKGRFTISRDNATNTVYLQMNSLKPEDTAVYYCAGKTTKWSLEYDYWGQGTQVTVSSGGGGSGGGGSGGGGSGGGGSEVQLVESGGGLMQTGGSLRLSCAASGVTYSYYTASWFRQAPGKEREFVAAISPSGNTYYADSVKGRFTISRDNGKHTMYLQMNSLNPEDTAVYFCAIRATDSIYYASSYRHWGQGTQVTVSS

SEQ ID NO: 660 - protein, 267 aa, Artificial
  Nanobody sequence
EVQLVESGGKLVQAGGSLRLSCAVSGRTSSIYNMAWFRQGPGKGRESVGRIYWSDDNTYYADSVKGRFTISRDNATNTVYLQMNSLKPEDTAVYYCAGKTTKWSLEYDYWGQGTQVTVSSGGGGSGGGGSGGGGSGGGGSEVQLVESGGGLVQAGGSLRLTCAASGRTFRSYAMGWFRQAPGKEREFVAAINYSGGSTNYADSVKGRFTISRDNAKNTLYLQMNSLEPEDTAVYYCAAGSGYASLSYYSTERAYTYWGQGTQVTVSS

SEQ ID NO: 661 - protein, 266 aa, Artificial
  Nanobody sequence
EVQLVESGGKLVQAGGSLRLSCAVSGRTSSIYNMAWFRQGPGKGRESVGRIYWSDDNTYYADSVKGRFTISRDNATNTVYLQMNSLKPEDTAVYYCAGKTTKWSLEYDYWGQGTQVTVSSGGGGSGGGGSGGGGSGGGGSEVQLVESGGGLVQAGGSLRLSCAASGRTFRSYPMGWFRQAPGKEREFVASITGSGGSTYYADSVKGRFTISRDNAKNTVYLQMNSLRPEDTAVYSCAAYIRPDTYLSRDYRKYDYWGQGTQVTVSS

SEQ ID NO: 662 - protein, 266 aa, Artificial
  Nanobody sequence
EVQLVESGGKLVQAGGSLRLSCAVSGRTSSIYNMAWFRQGPGKGRESVGRIYWSDDNTYYADSVKGRFTISRDNATNTVYLQMNSLKPEDTAVYYCAGKTTKWSLEYDYWGQGTQVTVSSGGGGSGGGGSGGGGSGGGGSEVQLVESGGGLVQAGGSLRLSCAAAGGTFRNYVMGWFRQAPGKEREFVTAISTGGSWTGYVDSVKDRFTISRDNTKNTVYLQMASLKPEDTAVYYCAATTPATTYLPRSERQYDYWGQGTQVTVSS

SEQ ID NO: 663 - protein, 267 aa, Artificial
  Nanobody sequence
EVQLVESGGKLVQAGGSLRLSCAVSGRTSSIYNMAWFRQGPGKGRESVGRIYWSDDNTYYADSVKGRFTISRDNATNTVYLQMNSLKPEDTAVYYCAGKTTKWSLEYDYWGQGTQVTVSSGGGGSGGGGSGGGGSGGGGSEVQLVESGGGLVQAGGSLRLSCAASGRTFSRSAMGWFRQAPGKEREFVGFITGSGGTTYYGESVKGRFTISRDNAQNPVYLQMNSLKPEDTAVYYCGVYRRTYISSTYSESSEYDYWGQGTQVTVSS

SEQ ID NO: 664 - protein, 262 aa, Artificial
  Nanobody sequence
EVQLVESGGGLMQTGGSLRLSCAASGVTYSYYTASWFRQAPGKEREFVAAISPSGNTYYADSVKGRFTISRDNGKHTMYLQMNSLNPEDTAVYFCAIRATDSIYYASSYRHWGQGTQVTVSSGGGGSGGGGSGGGGSGGGGSEVQLVESGGKLVQAGGSLRLSCAVSGRTSSIYNMAWFRQGPGKGRESVGRIYWSDDNTYYADSVKGRFTISRDNATNTVYLQMNSLKPEDTAVYYCAGKTTKWSLEYDYWGQGTQVTVSS

SEQ ID NO: 665 - protein, 264 aa, Artificial
  Nanobody sequence
EVQLVESGGGLMQTGGSLRLSCAASGVTYSYYTASWFRQAPGKEREFVAAISPSGNTYYADSVKGRFTISRDNGKHTMYLQMNSLNPEDTAVYFCAIRATDSIYYASSYRHWGQGTQVTVSSGGGGSGGGGSGGGGSGGGGSEVQLVESGGGLMQTGGSLRLSCAASGVTYSYYTASWFRQAPGKEREFVAAISPSGNTYYADSVKGRFTISRDNGKHTMYLQMNSLNPEDTAVYFCAIRATDSIYYASSYRHWGQGTQVTVSS

SEQ ID NO: 666 - protein, 269 aa, Artificial
  Nanobody sequence
EVQLVESGGGLMQTGGSLRLSCAASGVTYSYYTASWFRQAPGKEREFVAAISPSGNTYYADSVKGRFTISRDNGKHTMYLQMNSLNPEDTAVYFCAIRATDSIYYASSYRHWGQGTQVTVSSGGGGSGGGGSGGGGSGGGGSEVQLVESGGGLVQAGGSLRLTCAASGRTFRSYAMGWFRQAPGKEREFVAAINYSGGSTNYADSVKGRFTISRDNAKNTLYLQMNSLEPEDTAVYYCAAGSGYASLSYYSTERAYTYWGQGTQVTVSS

SEQ ID NO: 667 - protein, 268 aa, Artificial
  Nanobody sequence
EVQLVESGGGLMQTGGSLRLSCAASGVTYSYYTASWFRQAPGKEREFVAAISPSGNTYYADSVKGRFTISRDNGKHTMYLQMNSLNPEDTAVYFCAIRATDSIYYASSYRHWGQGTQVTVSSGGGGSGGGGSGGGGSGGGGSEVQLVESGGGLVQAGGSLRLSCAASGRTFRSYPMGWFRQAPGKEREFVASITGSGGSTYYADSVKGRFTISRDNAKNTVYLQMNSLRPEDTAVYSCAAYIRPDTYLSRDYRKYDYWGQGTQVTVSS

SEQ ID NO: 668 - protein, 268 aa, Artificial
  Nanobody sequence
EVQLVESGGGLMQTGGSLRLSCAASGVTYSYYTASWFRQAPGKEREFVAAISPSGNTYYADSVKGRFTISRDNGKHTMYLQMNSLNPEDTAVYFCAIRATDSIYYASSYRHWGQGTQVTVSSGGGGSGGGGSGGGGSGGGGSEVQLVESGGGLVQAGGSLRLSCAAAGGTFRNYVMGWFRQAPGKEREFVTAISTGGSWTGYVDSVKDRFTISRDNTKNTVYLQMASLKPEDTAVYYCAATTPATTYLPRSERQYDYWGQGTQVTVSS

SEQ ID NO: 669 - protein, 269 aa, Artificial
  Nanobody sequence
EVQLVESGGGLMQTGGSLRLSCAASGVTYSYYTASWFRQAPGKEREFVAAISPSGNTYYADSVKGRFTISRDNGKHTMYLQMNSLNPEDTAVYFCAIRATDSIYYASSYRHWGQGTQVTVSSGGGGSGGGGSGGGGSGGGGSEVQLVESGGGLVQAGGSLRLSCAASGRTFSRSAMGWFRQAPGKEREFVGFITGSGGTTYYGESVKGRFTISRDNAQNPVYLQMNSLKPEDTAVYYCGVYRRTYISSTYSESSEYDYWGQGTQVTVSS

SEQ ID NO: 670 - protein, 267 aa, Artificial
  Nanobody sequence
EVQLVESGGGLVQAGGSLRLTCAASGRTFRSYAMGWFRQAPGKEREFVAAINYSGGSTNYADSVKGRFTISRDNAKNTLYLQMNSLEPEDTAVYYCAAGSGYASLSYYSTERAYTYWGQGTQVTVSSGGGGSGGGGSGGGGSGGGGSEVQLVESGGKLVQAGGSLRLSCAVSGRTSSIYNMAWFRQGPGKGRESVGRIYWSDDNTYYADSVKGRFTISRDNATNTVYLQMNSLKPEDTAVYYCAGKTTKWSLEYDYWGQGTQVTVSS

SEQ ID NO: 671 - protein, 269 aa, Artificial
  Nanobody sequence
EVQLVESGGGLVQAGGSLRLTCAASGRTFRSYAMGWFRQAPGKEREFVAAINYSGGSTNYADSVKGRFTISRDNAKNTLYLQMNSLEPEDTAVYYCAAGSGYASLSYYSTERAYTYWGQGTQVTVSSGGGGSGGGGSGGGGSGGGGSEVQLVESGGGLMQTGGSLRLSCAASGVTYSYYTASWFRQAPGKEREFVAAISPSGNTYYADSVKGRFTISRDNGKHTMYLQMNSLNPEDTAVYFCAIRATDSIYYASSYRHWGQGTQVTVSS

SEQ ID NO: 672 - protein, 274 aa, Artificial
  Nanobody sequence
EVQLVESGGGLVQAGGSLRLTCAASGRTFRSYAMGWFRQAPGKEREFVAAINYSGGSTNYADSVKGRFTISRDNAKNTLYLQMNSLEPEDTAVYYCAAGSGYASLSYYSTERAYTYWGQGTQVTVSSGGGGSGGGGSGGGGSGGGGSEVQLVESGGGLVQAGGSLRLTCAASGRTFRSYAMGWFRQAPGKEREFVAAINYSGGSTNYADSVKGRFTISRDNAKNTLYLQMNSLEPEDTAVYYCAAGSGYASLSYYSTERAYTYWGQGTQVTVSS

SEQ ID NO: 673 - protein, 273 aa, Artificial
  Nanobody sequence
EVQLVESGGGLVQAGGSLRLTCAASGRTFRSYAMGWFRQAPGKEREFVAAINYSGGSTNYADSVKGRFTISRDNAKNTLYLQMNSLEPEDTAVYYCAAGSGYASLSYYSTERAYTYWGQGTQVTVSSGGGGSGGGGSGGGGSGGGGSEVQLVESGGGLVQAGGSLRLSCAASGRTFRSYPMGWFRQAPGKEREFVASITGSGGSTYYADSVKGRFTISRDNAKNTVYLQMNSLRPEDTAVYSCAAYIRPDTYLSRDYRKYDYWGQGTQVTVSS

SEQ ID NO: 674 - protein, 273 aa, Artificial
  Nanobody sequence
EVQLVESGGGLVQAGGSLRLTCAASGRTFRSYAMGWFRQAPGKEREFVAAINYSGGSTNYADSVKGRFTISRDNAKNTLYLQMNSLEPEDTAVYYCAAGSGYASLSYYSTERAYTYWGQGTQVTVSSGGGGSGGGGSGGGGSGGGGSEVQLVESGGGLVQAGGSLRLSCAAAGGTFRNYVMGWFRQAPGKEREFVTAISTGGSWTGYVDSVKDRFTISRDNTKNTVYLQMASLKPEDTAVYYCAATTPATTYLPRSERQYDYWGQGTQVTVSS

SEQ ID NO: 675 - protein, 274 aa, Artificial
  Nanobody sequence
EVQLVESGGGLVQAGGSLRLTCAASGRTFRSYAMGWFRQAPGKEREFVAAINYSGGSTNYADSVKGRFTISRDNAKNTLYLQMNSLEPEDTAVYYCAAGSGYASLSYYSTERAYTYWGQGTQVTVSSGGGGSGGGGSGGGGSGGGGSEVQLVESGGGLVQAGGSLRLSCAASGRTFSRSAMGWFRQAPGKEREFVGFITGSGGTTYYGESVKGRFTISRDNAQNPVYLQMNSLKPEDTAVYYCGVYRRTYISSTYSESSEYDYWGQGTQVTVSS

SEQ ID NO: 676 - protein, 266 aa, Artificial
  Nanobody sequence
EVQLVESGGGLVQAGGSLRLSCAASGRTFRSYPMGWFRQAPGKEREFVASITGSGGSTYYADSVKGRFTISRDNAKNTVYLQMNSLRPEDTAVYSCAAYIRPDTYLSRDYRKYDYWGQGTQVTVSSGGGGSGGGGSGGGGSGGGGSEVQLVESGGKLVQAGGSLRLSCAVSGRTSSIYNMAWFRQGPGKGRESVGRIYWSDDNTYYADSVKGRFTISRDNATNTVYLQMNSLKPEDTAVYYCAGKTTKWSLEYDYWGQGTQVTVSS

SEQ ID NO: 677 - protein, 268 aa, Artificial
  Nanobody sequence
EVQLVESGGGLVQAGGSLRLSCAASGRTFRSYPMGWFRQAPGKEREFVASITGSGGSTYYADSVKGRFTISRDNAKNTVYLQMNSLRPEDTAVYSCAAYIRPDTYLSRDYRKYDYWGQGTQVTVSSGGGGSGGGGSGGGGSGGGGSEVQLVESGGGLMQTGGSLRLSCAASGVTYSYYTASWFRQAPGKEREFVAAISPSGNTYYADSVKGRFTISRDNGKHTMYLQMNSLNPEDTAVYFCAIRATDSIYYASSYRHWGQGTQVTVSS

SEQ ID NO: 678 - protein, 273 aa, Artificial
  Nanobody sequence
EVQLVESGGGLVQAGGSLRLSCAASGRTFRSYPMGWFRQAPGKEREFVASITGSGGSTYYADSVKGRFTISRDNAKNTVYLQMNSLRPEDTAVYSCAAYIRPDTYLSRDYRKYDYWGQGTQVTVSSGGGGSGGGGSGGGGSGGGGSEVQLVESGGGLVQAGGSLRLTCAASGRTFRSYAMGWFRQAPGKEREFVAAINYSGGSTNYADSVKGRFTISRDNAKNTLYLQMNSLEPEDTAVYYCAAGSGYASLSYYSTERAYTYWGQGTQVTVSS

SEQ ID NO: 679 - protein, 272 aa, Artificial
  Nanobody sequence
EVQLVESGGGLVQAGGSLRLSCAASGRTFRSYPMGWFRQAPGKEREFVASITGSGGSTYYADSVKGRFTISRDNAKNTVYLQMNSLRPEDTAVYSCAAYIRPDTYLSRDYRKYDYWGQGTQVTVSSGGGGSGGGGSGGGGSGGGGSEVQLVESGGGLVQAGGSLRLSCAASGRTFRSYPMGWFRQAPGKEREFVASITGSGGSTYYADSVKGRFTISRDNAKNTVYLQMNSLRPEDTAVYSCAAYIRPDTYLSRDYRKYDYWGQGTQVTVSS

SEQ ID NO: 680 - protein, 272 aa, Artificial
  Nanobody sequence
EVQLVESGGGLVQAGGSLRLSCAASGRTFRSYPMGWFRQAPGKEREFVASITGSGGSTYYADSVKGRFTISRDNAKNTVYLQMNSLRPEDTAVYSCAAYIRPDTYLSRDYRKYDYWGQGTQVTVSSGGGGSGGGGSGGGGSGGGGSEVQLVESGGGLVQAGGSLRLSCAAAGGTFRNYVMGWFRQAPGKEREFVTAISTGGSWTGYVDSVKDRFTISRDNTKNTVYLQMASLKPEDTAVYYCAATTPATTYLPRSERQYDYWGQGTQVTVSS

SEQ ID NO: 681 - protein, 273 aa, Artificial
  Nanobody sequence
EVQLVESGGGLVQAGGSLRLSCAASGRTFRSYPMGWFRQAPGKEREFVASITGSGGSTYYADSVKGRFTISRDNAKNTVYLQMNSLRPEDTAVYSCAAYIRPDTYLSRDYRKYDYWGQGTQVTVSSGGGGSGGGGSGGGGSGGGGSEVQLVESGGGLVQAGGSLRLSCAASGRTFSRSAMGWFRQAPGKEREFVGFITGSGGTTYYGESVKGRFTISRDNAQNPVYLQMNSLKPEDTAVYYCGVYRRTYISSTYSESSEYDYWGQGTQVTVSS

SEQ ID NO: 682 - protein, 266 aa, Artificial
  Nanobody sequence
EVQLVESGGGLVQAGGSLRLSCAAAGGTFRNYVMGWFRQAPGKEREFVTAISTGGSWTGYVDSVKDRFTISRDNTKNTVYLQMASLKPEDTAVYYCAATTPATTYLPRSERQYDYWGQGTQVTVSSGGGGSGGGGSGGGGSGGGGSEVQLVESGGKLVQAGGSLRLSCAVSGRTSSIYNMAWFRQGPGKGRESVGRIYWSDDNTYYADSVKGRFTISRDNATNTVYLQMNSLKPEDTAVYYCAGKTTKWSLEYDYWGQGTQVTVSS

SEQ ID NO: 683 - protein, 268 aa, Artificial
  Nanobody sequence
EVQLVESGGGLVQAGGSLRLSCAAAGGTFRNYVMGWFRQAPGKEREFVTAISTGGSWTGYVDSVKDRFTISRDNTKNTVYLQMASLKPEDTAVYYCAATTPATTYLPRSERQYDYWGQGTQVTVSSGGGGSGGGGSGGGGSGGGGSEVQLVESGGGLMQTGGSLRLSCAASGVTYSYYTASWFRQAPGKEREFVAAISPSGNTYYADSVKGRFTISRDNGKHTMYLQMNSLNPEDTAVYFCAIRATDSIYYASSYRHWGQGTQVTVSS

SEQ ID NO: 684 - protein, 273 aa, Artificial
  Nanobody sequence
EVQLVESGGGLVQAGGSLRLSCAAAGGTFRNYVMGWFRQAPGKEREFVTAISTGGSWTGYVDSVKDRFTISRDNTKNTVYLQMASLKPEDTAVYYCAATTPATTYLPRSERQYDYWGQGTQVTVSSGGGGSGGGGSGGGGSGGGGSEVQLVESGGGLVQAGGSLRLTCAASGRTFRSYAMGWFRQAPGKEREFVAAINYSGGSTNYADSVKGRFTISRDNAKNTLYLQMNSLEPEDTAVYYCAAGSGYASLSYYSTERAYTYWGQGTQVTVSS

SEQ ID NO: 685 - protein, 272 aa, Artificial
  Nanobody sequence
EVQLVESGGGLVQAGGSLRLSCAAAGGTFRNYVMGWFRQAPGKEREFVTAISTGGSWTGYVDSVKDRFTISRDNTKNTVYLQMASLKPEDTAVYYCAATTPATTYLPRSERQYDYWGQGTQVTVSSGGGGSGGGGSGGGGSGGGGSEVQLVESGGGLVQAGGSLRLSCAASGRTFRSYPMGWFRQAPGKEREFVASITGSGGSTYYADSVKGRFTISRDNAKNTVYLQMNSLRPEDTAVYSCAAYIRPDTYLSRDYRKYDYWGQGTQVTVSS

SEQ ID NO: 686 - protein, 272 aa, Artificial
  Nanobody sequence
EVQLVESGGGLVQAGGSLRLSCAAAGGTFRNYVMGWFRQAPGKEREFVTAISTGGSWTGYVDSVKDRFTISRDNTKNTVYLQMASLKPEDTAVYYCAATTPATTYLPRSERQYDYWGQGTQVTVSSGGGGSGGGGSGGGGSGGGGSEVQLVESGGGLVQAGGSLRLSCAAAGGTFRNYVMGWFRQAPGKEREFVTAISTGGSWTGYVDSVKDRFTISRDNTKNTVYLQMASLKPEDTAVYYCAATTPATTYLPRSERQYDYWGQGTQVTVSS

SEQ ID NO: 687 - protein, 273 aa, Artificial
  Nanobody sequence
EVQLVESGGGLVQAGGSLRLSCAAAGGTFRNYVMGWFRQAPGKEREFVTAISTGGSWTGYVDSVKDRFTISRDNTKNTVYLQMASLKPEDTAVYYCAATTPATTYLPRSERQYDYWGQGTQVTVSSGGGGSGGGGSGGGGSGGGGSEVQLVESGGGLVQAGGSLRLSCAASGRTFSRSAMGWFRQAPGKEREFVGFITGSGGTTYYGESVKGRFTISRDNAQNPVYLQMNSLKPEDTAVYYCGVYRRTYISSTYSESSEYDYWGQGTQVTVSS

SEQ ID NO: 688 - protein, 267 aa, Artificial
  Nanobody sequence
EVQLVESGGGLVQAGGSLRLSCAASGRTFSRSAMGWFRQAPGKEREFVGFITGSGGTTYYGESVKGRFTISRDNAQNPVYLQMNSLKPEDTAVYYCGVYRRTYISSTYSESSEYDYWGQGTQVTVSSGGGGSGGGGSGGGGSGGGGSEVQLVESGGKLVQAGGSLRLSCAVSGRTSSIYNMAWFRQGPGKGRESVGRIYWSDDNTYYADSVKGRFTISRDNATNTVYLQMNSLKPEDTAVYYCAGKTTKWSLEYDYWGQGTQVTVSS

SEQ ID NO: 689 - protein, 269 aa, Artificial
  Nanobody sequence
EVQLVESGGGLVQAGGSLRLSCAASGRTFSRSAMGWFRQAPGKEREFVGFITGSGGTTYYGESVKGRFTISRDNAQNPVYLQMNSLKPEDTAVYYCGVYRRTYISSTYSESSEYDYWGQGTQVTVSSGGGGSGGGGSGGGGSGGGGSEVQLVESGGGLMQTGGSLRLSCAASGVTYSYYTASWFRQAPGKEREFVAAISPSGNTYYADSVKGRFTISRDNGKHTMYLQMNSLNPEDTAVYFCAIRATDSIYYASSYRHWGQGTQVTVSS

SEQ ID NO: 690 - protein, 274 aa, Artificial
  Nanobody sequence
EVQLVESGGGLVQAGGSLRLSCAASGRTFSRSAMGWFRQAPGKEREFVGFITGSGGTTYYGESVKGRFTISRDNAQNPVYLQMNSLKPEDTAVYYCGVYRRTYISSTYSESSEYDYWGQGTQVTVSSGGGGSGGGGSGGGGSGGGGSEVQLVESGGGLVQAGGSLRLTCAASGRTFRSYAMGWFRQAPGKEREFVAAINYSGGSTNYADSVKGRFTISRDNAKNTLYLQMNSLEPEDTAVYYCAAGSGYASLSYYSTERAYTYWGQGTQVTVSS

SEQ ID NO: 691 - protein, 273 aa, Artificial
  Nanobody sequence
EVQLVESGGGLVQAGGSLRLSCAASGRTFSRSAMGWFRQAPGKEREFVGFITGSGGTTYYGESVKGRFTISRDNAQNPVYLQMNSLKPEDTAVYYCGVYRRTYISSTYSESSEYDYWGQGTQVTVSSGGGGSGGGGSGGGGSGGGGSEVQLVESGGGLVQAGGSLRLSCAASGRTFRSYPMGWFRQAPGKEREFVASITGSGGSTYYADSVKGRFTISRDNAKNTVYLQMNSLRPEDTAVYSCAAYIRPDTYLSRDYRKYDYWGQGTQVTVSS

SEQ ID NO: 692 - protein, 273 aa, Artificial
  Nanobody sequence
EVQLVESGGGLVQAGGSLRLSCAASGRTFSRSAMGWFRQAPGKEREFVGFITGSGGTTYYGESVKGRFTISRDNAQNPVYLQMNSLKPEDTAVYYCGVYRRTYISSTYSESSEYDYWGQGTQVTVSSGGGGSGGGGSGGGGSGGGGSEVQLVESGGGLVQAGGSLRLSCAAAGGTFRNYVMGWFRQAPGKEREFVTAISTGGSWTGYVDSVKDRFTISRDNTKNTVYLQMASLKPEDTAVYYCAATTPATTYLPRSERQYDYWGQGTQVTVSS

SEQ ID NO: 693 - protein, 274 aa, Artificial
  Nanobody sequence
EVQLVESGGGLVQAGGSLRLSCAASGRTFSRSAMGWFRQAPGKEREFVGFITGSGGTTYYGESVKGRFTISRDNAQNPVYLQMNSLKPEDTAVYYCGVYRRTYISSTYSESSEYDYWGQGTQVTVSSGGGGSGGGGSGGGGSGGGGSEVQLVESGGGLVQAGGSLRLSCAASGRTFSRSAMGWFRQAPGKEREFVGFITGSGGTTYYGESVKGRFTISRDNAQNPVYLQMNSLKPEDTAVYYCGVYRRTYISSTYSESSEYDYWGQGTQVTVSS

SEQ ID NO: 694 - protein, 373 aa, Artificial
  Nanobody sequence
EVQLVESGGKLVQAGGSLRLSCAVSGRTSSIYNMAWFRQGPGKGRESVGRIYWSDDNTYYADSVKGRFTISRDNATNTVYLQMNSLKPEDTAVYYCAGKTTKWSLEYDYWGQGTQVTVSSGGGGSGGGSEVQLVESGGGLVQPGNSLRLSCAASGFTFRSFGMSWVRQAPGKEPEWVSSISGSGSDTLYADSVKGRFTISRDNAKTTLYLQMNSLKPEDTAVYYCTIGGSLSRSSQGTQVTVSSGGGGSGGGSEVQLVESGGKLVQAGGSLRLSCAVSGRTSSIYNMAWFRQGPGKGRESVGRIYWSDDNTYYADSVKGRFTISRDNATNTVYLQMNSLKPEDTAVYYCAGKTTKWSLEYDYWGQGTQVTVSS

SEQ ID NO: 695 - protein, 375 aa, Artificial
  Nanobody sequence
EVQLVESGGKLVQAGGSLRLSCAVSGRTSSIYNMAWFRQGPGKGRESVGRIYWSDDNTYYADSVKGRFTISRDNATNTVYLQMNSLKPEDTAVYYCAGKTTKWSLEYDYWGQGTQVTVSSGGGGSGGGSEVQLVESGGGLVQPGNSLRLSCAASGFTFRSFGMSWVRQAPGKEPEWVSSISGSGSDTLYADSVKGRFTISRDNAKTTLYLQMNSLKPEDTAVYYCTIGGSLSRSSQGTQVTVSSGGGGSGGGSEVQLVESGGGLMQTGGSLRLSCAASGVTYSYYTASWFRQAPGKEREFVAAISPSGNTYYADSVKGRFTISRDNGKHTMYLQMNSLNPEDTAVYFCAIRATDSIYYASSYRHWGQGTQVTVSS

SEQ ID NO: 696 - protein, 380 aa, Artificial
  Nanobody sequence
EVQLVESGGKLVQAGGSLRLSCAVSGRTSSIYNMAWFRQGPGKGRESVGRIYWSDDNTYYADSVKGRFTISRDNATNTVYLQMNSLKPEDTAVYYCAGKTTKWSLEYDYWGQGTQVTVSSGGGGSGGGSEVQLVESGGGLVQPGNSLRLSCAASGFTFRSFGMSWVRQAPGKEPEWVSSISGSGSDTLYADSVKGRFTISRDNAKTTLYLQMNSLKPEDTAVYYCTIGGSLSRSSQGTQVTVSSGGGGSGGGSEVQLVESGGGLVQAGGSLRLTCAASGRTFRSYAMGWFRQAPGKEREFVAAINYSGGSTNYADSVKGRFTISRDNAKNTLYLQMNSLEPEDTAVYYCAAGSGYASLSYYSTERAYTYWGQGTQVTVSS

SEQ ID NO: 697 - protein, 379 aa, Artificial
  Nanobody sequence
EVQLVESGGKLVQAGGSLRLSCAVSGRTSSIYNMAWFRQGPGKGRESVGRIYWSDDNTYYADSVKGRFTISRDNATNTVYLQMNSLKPEDTAVYYCAGKTTKWSLEYDYWGQGTQVTVSSGGGGSGGGSEVQLVESGGGLVQPGNSLRLSCAASGFTFRSFGMSWVRQAPGKEPEWVSSISGSGSDTLYADSVKGRFTISRDNAKTTLYLQMNSLKPEDTAVYYCTIGGSLSRSSQGTQVTVSSGGGGSGGGSEVQLVESGGGLVQAGGSLRLSCAASGRTFRSYPMGWFRQAPGKEREFVASITGSGGSTYYADSVKGRFTISRDNAKNTVYLQMNSLRPEDTAVYSCAAYIRPDTYLSRDYRKYDYWGQGTQVTVSS

SEQ ID NO: 698 - protein, 379 aa, Artificial
  Nanobody sequence
EVQLVESGGKLVQAGGSLRLSCAVSGRTSSIYNMAWFRQGPGKGRESVGRIYWSDDNTYYADSVKGRFTISRDNATNTVYLQMNSLKPEDTAVYYCAGKTTKWSLEYDYWGQGTQVTVSSGGGGSGGGSEVQLVESGGGLVQPGNSLRLSCAASGFTFRSFGMSWVRQAPGKEPEWVSSISGSGSDTLYADSVKGRFTISRDNAKTTLYLQMNSLKPEDTAVYYCTIGGSLSRSSQGTQVTVSSGGGGSGGGSEVQLVESGGGLVQAGGSLRLSCAAAGGTFRNYVMGWFRQAPGKEREFVTAISTGGSWTGYVDSVKDRFTISRDNTKNTVYLQMASLKPEDTAVYYCAATTPATTYLPRSERQYDYWGQGTQVTVSS

SEQ ID NO: 699 - protein, 380 aa, Artificial
  Nanobody sequence
EVQLVESGGKLVQAGGSLRLSCAVSGRTSSIYNMAWFRQGPGKGRESVGRIYWSDDNTYYADSVKGRFTISRDNATNTVYLQMNSLKPEDTAVYYCAGKTTKWSLEYDYWGQGTQVTVSSGGGGSGGGSEVQLVESGGGLVQPGNSLRLSCAASGFTFRSFGMSWVRQAPGKEPEWVSSISGSGSDTLYADSVKGRFTISRDNAKTTLYLQMNSLKPEDTAVYYCTIGGSLSRSSQGTQVTVSSGGGGSGGGSEVQLVESGGGLVQAGGSLRLSCAASGRTFSRSAMGWFRQAPGKEREFVGFITGSGGTTYYGESVKGRFTISRDNAQNPVYLQMNSLKPEDTAVYYCGVYRRTHISSTYSESSEYDYWGQGTQVTVSS

SEQ ID NO: 700 - protein, 375 aa, Artificial
  Nanobody sequence
EVQLVESGGGLMQTGGSLRLSCAASGVTYSYYTASWFRQAPGKEREFVAAISPSGNTYYADSVKGRFTISRDNGKHTMYLQMNSLNPEDTAVYFCAIRATDSIYYASSYRHWGQGTQVTVSSGGGGSGGGSEVQLVESGGGLVQPGNSLRLSCAASGFTFRSFGMSWVRQAPGKEPEWVSSISGSGSDTLYADSVKGRFTISRDNAKTTLYLQMNSLKPEDTAVYYCTIGGSLSRSSQGTQVTVSSGGGGSGGGSEVQLVESGGKLVQAGGSLRLSCAVSGRTSSIYNMAWFRQGPGKGRESVGRIYWSDDNTYYADSVKGRFTISRDNATNTVYLQMNSLKPEDTAVYYCAGKTTKWSLEYDYWGQGTQVTVSS

SEQ ID NO: 701 - protein, 377 aa, Artificial
  Nanobody sequence
EVQLVESGGGLMQTGGSLRLSCAASGVTYSYYTASWFRQAPGKEREFVAAISPSGNTYYADSVKGRFTISRDNGKHTMYLQMNSLNPEDTAVYFCAIRATDSIYYASSYRHWGQGTQVTVSSGGGGSGGGSEVQLVESGGGLVQPGNSLRLSCAASGFTFRSFGMSWVRQAPGKEPEWVSSISGSGSDTLYADSVKGRFTISRDNAKTTLYLQMNSLKPEDTAVYYCTIGGSLSRSSQGTQVTVSSGGGGSGGGSEVQLVESGGGLMQTGGSLRLSCAASGVTYSYYTASWFRQAPGKEREFVAAISPSGNTYYADSVKGRFTISRDNGKHTMYLQMNSLNPEDTAVYFCAIRATDSIYYASSYRHWGQGTQVTVSS

SEQ ID NO: 702 - protein, 382 aa, Artificial
  Nanobody sequence
EVQLVESGGGLMQTGGSLRLSCAASGVTYSYYTASWFRQAPGKEREFVAAISPSGNTYYADSVKGRFTISRDNGKHTMYLQMNSLNPEDTAVYFCAIRATDSIYYASSYRHWGQGTQVTVSSGGGGSGGGSEVQLVESGGGLVQPGNSLRLSCAASGFTFRSFGMSWVRQAPGKEPEWVSSISGSGSDTLYADSVKGRFTISRDNAKTTLYLQMNSLKPEDTAVYYCTIGGSLSRSSQGTQVTVSSGGGGSGGGSEVQLVESGGGLVQAGGSLRLTCAASGRTFRSYAMGWFRQAPGKEREFVAAINYSGGSTNYADSVKGRFTISRDNAKNTLYLQMNSLEPEDTAVYYCAAGSGYASLSYYSTERAYTYWGQGTQVTVSS

SEQ ID NO: 703 - protein, 381 aa, Artificial
  Nanobody sequence
EVQLVESGGGLMQTGGSLRLSCAASGVTYSYYTASWFRQAPGKEREFVAAISPSGNTYYADSVKGRFTISRDNGKHTMYLQMNSLNPEDTAVYFCAIRATDSIYYASSYRHWGQGTQVTVSSGGGGSGGGSEVQLVESGGGLVQPGNSLRLSCAASGFTFRSFGMSWVRQAPGKEPEWVSSISGSGSDTLYADSVKGRFTISRDNAKTTLYLQMNSLKPEDTAVYYCTIGGSLSRSSQGTQVTVSSGGGGSGGGSEVQLVESGGGLVQAGGSLRLSCAASGRTFRSYPMGWFRQAPGKEREFVASITGSGGSTYYADSVKGRFTISRDNAKNTVYLQMNSLRPEDTAVYSCAAYIRPDTYLSRDYRKYDYWGQGTQVTVSS

SEQ ID NO: 704 - protein, 381 aa, Artificial
  Nanobody sequence
EVQLVESGGGLMQTGGSLRLSCAASGVTYSYYTASWFRQAPGKEREFVAAISPSGNTYYADSVKGRFTISRDNGKHTMYLQMNSLNPEDTAVYFCAIRATDSIYYASSYRHWGQGTQVTVSSGGGGSGGGSEVQLVESGGGLVQPGNSLRLSCAASGFTFRSFGMSWVRQAPGKEPEWVSSISGSGSDTLYADSVKGRFTISRDNAKTTLYLQMNSLKPEDTAVYYCTIGGSLSRSSQGTQVTVSSGGGGSGGGSEVQLVESGGGLVQAGGSLRLSCAAAGGTFRNYVMGWFRQAPGKEREFVTAISTGGSWTGYVDSVKDRFTISRDNTKNTVYLQMASLKPEDTAVYYCAATTPATTYLPRSERQYDYWGQGTQVTVSS

SEQ ID NO: 705 - protein, 382 aa, Artificial
  Nanobody sequence
EVQLVESGGGLMQTGGSLRLSCAASGVTYSYYTASWFRQAPGKEREFVAAISPSGNTYYADSVKGRFTISRDNGKHTMYLQMNSLNPEDTAVYFCAIRATDSIYYASSYRHWGQGTQVTVSSGGGGSGGGSEVQLVESGGGLVQPGNSLRLSCAASGFTFRSFGMSWVRQAPGKEPEWVSSISGSGSDTLYADSVKGRFTISRDNAKTTLYLQMNSLKPEDTAVYYCTIGGSLSRSSQGTQVTVSSGGGGSGGGSEVQLVESGGGLVQAGGSLRLSCAASGRTFSRSAMGWFRQAPGKEREFVGFITGSGGTTYYGESVKGRFTISRDNAQNPVYLQMNSLKPEDTAVYYCGVYRRTHISSTYSESSEYDYWGQGTQVTVSS

SEQ ID NO: 706 - protein, 380 aa, Artificial
  Nanobody sequence
EVQLVESGGGLVQAGGSLRLTCAASGRTFRSYAMGWFRQAPGKEREFVAAINYSGGSTNYADSVKGRFTISRDNAKNTLYLQMNSLEPEDTAVYYCAAGSGYASLSYYSTERAYTYWGQGTQVTVSSGGGGSGGGSEVQLVESGGGLVQPGNSLRLSCAASGFTFRSFGMSWVRQAPGKEPEWVSSISGSGSDTLYADSVKGRFTISRDNAKTTLYLQMNSLKPEDTAVYYCTIGGSLSRSSQGTQVTVSSGGGGSGGGSEVQLVESGGKLVQAGGSLRLSCAVSGRTSSIYNMAWFRQGPGKGRESVGRIYWSDDNTYYADSVKGRFTISRDNATNTVYLQMNSLKPEDTAVYYCAGKTTKWSLEYDYWGQGTQVTVSS

SEQ ID NO: 707 - protein, 382 aa, Artificial
  Nanobody sequence
EVQLVESGGGLVQAGGSLRLTCAASGRTFRSYAMGWFRQAPGKEREFVAAINYSGGSTNYADSVKGRFTISRDNAKNTLYLQMNSLEPEDTAVYYCAAGSGYASLSYYSTERAYTYWGQGTQVTVSSGGGGSGGGSEVQLVESGGGLVQPGNSLRLSCAASGFTFRSFGMSWVRQAPGKEPEWVSSISGSGSDTLYADSVKGRFTISRDNAKTTLYLQMNSLKPEDTAVYYCTIGGSLSRSSQGTQVTVSSGGGGSGGGSEVQLVESGGGLMQTGGSLRLSCAASGVTYSYYTASWFRQAPGKEREFVAAISPSGNTYYADSVKGRFTISRDNGKHTMYLQMNSLNPEDTAVYFCAIRATDSIYYASSYRHWGQGTQVTVSS

SEQ ID NO: 708 - protein, 387 aa, Artificial
  Nanobody sequence
EVQLVESGGGLVQAGGSLRLTCAASGRTFRSYAMGWFRQAPGKEREFVAAINYSGGSTNYADSVKGRFTISRDNAKNTLYLQMNSLEPEDTAVYYCAAGSGYASLSYYSTERAYTYWGQGTQVTVSSGGGGSGGGSEVQLVESGGGLVQPGNSLRLSCAASGFTFRSFGMSWVRQAPGKEPEWVSSISGSGSDTLYADSVKGRFTISRDNAKTTLYLQMNSLKPEDTAVYYCTIGGSLSRSSQGTQVTVSSGGGGSGGGSEVQLVESGGGLVQAGGSLRLTCAASGRTFRSYAMGWFRQAPGKEREFVAAINYSGGSTNYADSVKGRFTISRDNAKNTLYLQMNSLEPEDTAVYYCAAGSGYASLSYYSTERAYTYWGQGTQVTVSS

SEQ ID NO: 709 - protein, 386 aa, Artificial
  Nanobody sequence
EVQLVESGGGLVQAGGSLRLTCAASGRTFRSYAMGWFRQAPGKEREFVAAINYSGGSTNYADSVKGRFTISRDNAKNTLYLQMNSLEPEDTAVYYCAAGSGYASLSYYSTERAYTYWGQGTQVTVSSGGGGSGGGSEVQLVESGGGLVQPGNSLRLSCAASGFTFRSFGMSWVRQAPGKEPEWVSSISGSGSDTLYADSVKGRFTISRDNAKTTLYLQMNSLKPEDTAVYYCTIGGSLSRSSQGTQVTVSSGGGGSGGGSEVQLVESGGGLVQAGGSLRLSCAASGRTFRSYPMGWFRQAPGKEREFVASITGSGGSTYYADSVKGRFTISRDNAKNTVYLQMNSLRPEDTAVYSCAAYIRPDTYLSRDYRKYDYWGQGTQVTVSS

SEQ ID NO: 710 - protein, 386 aa, Artificial
  Nanobody sequence
EVQLVESGGGLVQAGGSLRLTCAASGRTFRSYAMGWFRQAPGKEREFVAAINYSGGSTNYADSVKGRFTISRDNAKNTLYLQMNSLEPEDTAVYYCAAGSGYASLSYYSTERAYTYWGQGTQVTVSSGGGGSGGGSEVQLVESGGGLVQPGNSLRLSCAASGFTFRSFGMSWVRQAPGKEPEWVSSISGSGSDTLYADSVKGRFTISRDNAKTTLYLQMNSLKPEDTAVYYCTIGGSLSRSSQGTQVTVSSGGGGSGGGSEVQLVESGGGLVQAGGSLRLSCAAAGGTFRNYVMGWFRQAPGKEREFVTAISTGGSWTGYVDSVKDRFTISRDNTKNTVYLQMASLKPEDTAVYYCAATTPATTYLPRSERQYDYWGQGTQVTVSS

SEQ ID NO: 711 - protein, 387 aa, Artificial
  Nanobody sequence
EVQLVESGGGLVQAGGSLRLTCAASGRTFRSYAMGWFRQAPGKEREFVAAINYSGGSTNYADSVKGRFTISRDNAKNTLYLQMNSLEPEDTAVYYCAAGSGYASLSYYSTERAYTYWGQGTQVTVSSGGGGSGGGSEVQLVESGGGLVQPGNSLRLSCAASGFTFRSFGMSWVRQAPGKEPEWVSSISGSGSDTLYADSVKGRFTISRDNAKTTLYLQMNSLKPEDTAVYYCTIGGSLSRSSQGTQVTVSSGGGGSGGGSEVQLVESGGGLVQAGGSLRLSCAASGRTFSRSAMGWFRQAPGKEREFVGFITGSGGTTYYGESVKGRFTISRDNAQNPVYLQMNSLKPEDTAVYYCGVYRRTHISSTYSESSEYDYWGQGTQVTVSS

SEQ ID NO: 712 - protein, 379 aa, Artificial
  Nanobody sequence
EVQLVESGGGLVQAGGSLRLSCAASGRTFRSYPMGWFRQAPGKEREFVASITGSGGSTYYADSVKGRFTISRDNAKNTVYLQMNSLRPEDTAVYSCAAYIRPDTYLSRDYRKYDYWGQGTQVTVSSGGGGSGGGSEVQLVESGGGLVQPGNSLRLSCAASGFTFRSFGMSWVRQAPGKEPEWVSSISGSGSDTLYADSVKGRFTISRDNAKTTLYLQMNSLKPEDTAVYYCTIGGSLSRSSQGTQVTVSSGGGGSGGGSEVQLVESGGKLVQAGGSLRLSCAVSGRTSSIYNMAWFRQGPGKGRESVGRIYWSDDNTYYADSVKGRFTISRDNATNTVYLQMNSLKPEDTAVYYCAGKTTKWSLEYDYWGQGTQVTVSS

SEQ ID NO: 713 - protein, 381 aa, Artificial
  Nanobody sequence
EVQLVESGGGLVQAGGSLRLSCAASGRTFRSYPMGWFRQAPGKEREFVASITGSGGSTYYADSVKGRFTISRDNAKNTVYLQMNSLRPEDTAVYSCAAYIRPDTYLSRDYRKYDYWGQGTQVTVSSGGGGSGGGSEVQLVESGGGLVQPGNSLRLSCAASGFTFRSFGMSWVRQAPGKEPEWVSSISGSGSDTLYADSVKGRFTISRDNAKTTLYLQMNSLKPEDTAVYYCTIGGSLSRSSQGTQVTVSSGGGGSGGGSEVQLVESGGGLMQTGGSLRLSCAASGVTYSYYTASWFRQAPGKEREFVAAISPSGNTYYADSVKGRFTISRDNGKHTMYLQMNSLNPEDTAVYFCAIRATDSIYYASSYRHWGQGTQVTVSS

SEQ ID NO: 714 - protein, 386 aa, Artificial
  Nanobody sequence
EVQLVESGGGLVQAGGSLRLSCAASGRTFRSYPMGWFRQAPGKEREFVASITGSGGSTYYADSVKGRFTISRDNAKNTVYLQMNSLRPEDTAVYSCAAYIRPDTYLSRDYRKYDYWGQGTQVTVSSGGGGSGGGSEVQLVESGGGLVQPGNSLRLSCAASGFTFRSFGMSWVRQAPGKEPEWVSSISGSGSDTLYADSVKGRFTISRDNAKTTLYLQMNSLKPEDTAVYYCTIGGSLSRSSQGTQVTVSSGGGGSGGGSEVQLVESGGGLVQAGGSLRLTCAASGRTFRSYAMGWFRQAPGKEREFVAAINYSGGSTNYADSVKGRFTISRDNAKNTLYLQMNSLEPEDTAVYYCAAGSGYASLSYYSTERAYTYWGQGTQVTVSS

SEQ ID NO: 715 - protein, 385 aa, Artificial
  Nanobody sequence
EVQLVESGGGLVQAGGSLRLSCAASGRTFRSYPMGWFRQAPGKEREFVASITGSGGSTYYADSVKGRFTISRDNAKNTVYLQMNSLRPEDTAVYSCAAYIRPDTYLSRDYRKYDYWGQGTQVTVSSGGGGSGGGSEVQLVESGGGLVQPGNSLRLSCAASGFTFRSFGMSWVRQAPGKEPEWVSSISGSGSDTLYADSVKGRFTISRDNAKTTLYLQMNSLKPEDTAVYYCTIGGSLSRSSQGTQVTVSSGGGGSGGGSEVQLVESGGGLVQAGGSLRLSCAASGRTFRSYPMGWFRQAPGKEREFVASITGSGGSTYYADSVKGRFTISRDNAKNTVYLQMNSLRPEDTAVYSCAAYIRPDTYLSRDYRKYDYWGQGTQVTVSS

SEQ ID NO: 716 - protein, 385 aa, Artificial
  Nanobody sequence
EVQLVESGGGLVQAGGSLRLSCAASGRTFRSYPMGWFRQAPGKEREFVASITGSGGSTYYADSVKGRFTISRDNAKNTVYLQMNSLRPEDTAVYSCAAYIRPDTYLSRDYRKYDYWGQGTQVTVSSGGGGSGGGSEVQLVESGGGLVQPGNSLRLSCAASGFTFRSFGMSWVRQAPGKEPEWVSSISGSGSDTLYADSVKGRFTISRDNAKTTLYLQMNSLKPEDTAVYYCTIGGSLSRSSQGTQVTVSSGGGGSGGGSEVQLVESGGGLVQAGGSLRLSCAAAGGTFRNYVMGWFRQAPGKEREFVTAISTGGSWTGYVDSVKDRFTISRDNTKNTVYLQMASLKPEDTAVYYCAATTPATTYLPRSERQYDYWGQGTQVTVSS

SEQ ID NO: 717 - protein, 386 aa, Artificial
  Nanobody sequence
EVQLVESGGGLVQAGGSLRLSCAASGRTFRSYPMGWFRQAPGKEREFVASITGSGGSTYYADSVKGRFTISRDNAKNTVYLQMNSLRPEDTAVYSCAAYIRPDTYLSRDYRKYDYWGQGTQVTVSSGGGGSGGGSEVQLVESGGGLVQPGNSLRLSCAASGFTFRSFGMSWVRQAPGKEPEWVSSISGSGSDTLYADSVKGRFTISRDNAKTTLYLQMNSLKPEDTAVYYCTIGGSLSRSSQGTQVTVSSGGGGSGGGSEVQLVESGGGLVQAGGSLRLSCAASGRTFSRSAMGWFRQAPGKEREFVGFITGSGGTTYYGESVKGRFTISRDNAQNPVYLQMNSLKPEDTAVYYCGVYRRTHISSTYSESSEYDYWGQGTQVTVSS

SEQ ID NO: 718 - protein, 379 aa, Artificial
  Nanobody sequence
EVQLVESGGGLVQAGGSLRLSCAAAGGTFRNYVMGWFRQAPGKEREFVTAISTGGSWTGYVDSVKDRFTISRDNTKNTVYLQMASLKPEDTAVYYCAATTPATTYLPRSERQYDYWGQGTQVTVSSGGGGSGGGSEVQLVESGGGLVQPGNSLRLSCAASGFTFRSFGMSWVRQAPGKEPEWVSSISGSGSDTLYADSVKGRFTISRDNAKTTLYLQMNSLKPEDTAVYYCTIGGSLSRSSQGTQVTVSSGGGGSGGGSEVQLVESGGKLVQAGGSLRLSCAVSGRTSSIYNMAWFRQGPGKGRESVGRIYWSDDNTYYADSVKGRFTISRDNATNTVYLQMNSLKPEDTAVYYCAGKTTKWSLEYDYWGQGTQVTVSS

SEQ ID NO: 719 - protein, 381 aa, Artificial
  Nanobody sequence
EVQLVESGGGLVQAGGSLRLSCAAAGGTFRNYVMGWFRQAPGKEREFVTAISTGGSWTGYVDSVKDRFTISRDNTKNTVYLQMASLKPEDTAVYYCAATTPATTYLPRSERQYDYWGQGTQVTVSSGGGGSGGGSEVQLVESGGGLVQPGNSLRLSCAASGFTFRSFGMSWVRQAPGKEPEWVSSISGSGSDTLYADSVKGRFTISRDNAKTTLYLQMNSLKPEDTAVYYCTIGGSLSRSSQGTQVTVSSGGGGSGGGSEVQLVESGGGLMQTGGSLRLSCAASGVTYSYYTASWFRQAPGKEREFVAAISPSGNTYYADSVKGRFTISRDNGKHTMYLQMNSLNPEDTAVYFCAIRATDSIYYASSYRHWGQGTQVTVSS

SEQ ID NO: 720 - protein, 386 aa, Artificial
  Nanobody sequence
EVQLVESGGGLVQAGGSLRLSCAAAGGTFRNYVMGWFRQAPGKEREFVTAISTGGSWTGYVDSVKDRFTISRDNTKNTVYLQMASLKPEDTAVYYCAATTPATTYLPRSERQYDYWGQGTQVTVSSGGGGSGGGSEVQLVESGGGLVQPGNSLRLSCAASGFTFRSFGMSWVRQAPGKEPEWVSSISGSGSDTLYADSVKGRFTISRDNAKTTLYLQMNSLKPEDTAVYYCTIGGSLSRSSQGTQVTVSSGGGGSGGGSEVQLVESGGGLVQAGGSLRLTCAASGRTFRSYAMGWFRQAPGKEREFVAAINYSGGSTNYADSVKGRFTISRDNAKNTLYLQMNSLEPEDTAVYYCAAGSGYASLSYYSTERAYTYWGQGTQVTVSS

SEQ ID NO: 721 - protein, 385 aa, Artificial
  Nanobody sequence
EVQLVESGGGLVQAGGSLRLSCAAAGGTFRNYVMGWFRQAPGKEREFVTAISTGGSWTGYVDSVKDRFTISRDNTKNTVYLQMASLKPEDTAVYYCAATTPATTYLPRSERQYDYWGQGTQVTVSSGGGGSGGGSEVQLVESGGGLVQPGNSLRLSCAASGFTFRSFGMSWVRQAPGKEPEWVSSISGSGSDTLYADSVKGRFTISRDNAKTTLYLQMNSLKPEDTAVYYCTIGGSLSRSSQGTQVTVSSGGGGSGGGSEVQLVESGGGLVQAGGSLRLSCAASGRTFRSYPMGWFRQAPGKEREFVASITGSGGSTYYADSVKGRFTISRDNAKNTVYLQMNSLRPEDTAVYSCAAYIRPDTYLSRDYRKYDYWGQGTQVTVSS

SEQ ID NO: 722 - protein, 385 aa, Artificial
  Nanobody sequence
EVQLVESGGGLVQAGGSLRLSCAAAGGTFRNYVMGWFRQAPGKEREFVTAISTGGSWTGYVDSVKDRFTISRDNTKNTVYLQMASLKPEDTAVYYCAATTPATTYLPRSERQYDYWGQGTQVTVSSGGGGSGGGSEVQLVESGGGLVQPGNSLRLSCAASGFTFRSFGMSWVRQAPGKEPEWVSSISGSGSDTLYADSVKGRFTISRDNAKTTLYLQMNSLKPEDTAVYYCTIGGSLSRSSQGTQVTVSSGGGGSGGGSEVQLVESGGGLVQAGGSLRLSCAAAGGTFRNYVMGWFRQAPGKEREFVTAISTGGSWTGYVDSVKDRFTISRDNTKNTVYLQMASLKPEDTAVYYCAATTPATTYLPRSERQYDYWGQGTQVTVSS

SEQ ID NO: 723 - protein, 386 aa, Artificial
  Nanobody sequence
EVQLVESGGGLVQAGGSLRLSCAAAGGTFRNYVMGWFRQAPGKEREFVTAISTGGSWTGYVDSVKDRFTISRDNTKNTVYLQMASLKPEDTAVYYCAATTPATTYLPRSERQYDYWGQGTQVTVSSGGGGSGGGSEVQLVESGGGLVQPGNSLRLSCAASGFTFRSFGMSWVRQAPGKEPEWVSSISGSGSDTLYADSVKGRFTISRDNAKTTLYLQMNSLKPEDTAVYYCTIGGSLSRSSQGTQVTVSSGGGGSGGGSEVQLVESGGGLVQAGGSLRLSCAASGRTFSRSAMGWFRQAPGKEREFVGFITGSGGTTYYGESVKGRFTISRDNAQNPVYLQMNSLKPEDTAVYYCGVYRRTHISSTYSESSEYDYWGQGTQVTVSS

SEQ ID NO: 724 - protein, 380 aa, Artificial
  Nanobody sequence
EVQLVESGGGLVQAGGSLRLSCAASGRTFSRSAMGWFRQAPGKEREFVGFITGSGGTTYYGESVKGRFTISRDNAQNPVYLQMNSLKPEDTAVYYCGVYRRTHISSTYSESSEYDYWGQGTQVTVSSGGGGSGGGSEVQLVESGGGLVQPGNSLRLSCAASGFTFRSFGMSWVRQAPGKEPEWVSSISGSGSDTLYADSVKGRFTISRDNAKTTLYLQMNSLKPEDTAVYYCTIGGSLSRSSQGTQVTVSSGGGGSGGGSEVQLVESGGKLVQAGGSLRLSCAVSGRTSSIYNMAWFRQGPGKGRESVGRIYWSDDNTYYADSVKGRFTISRDNATNTVYLQMNSLKPEDTAVYYCAGKTTKWSLEYDYWGQGTQVTVSS

SEQ ID NO: 725 - protein, 382 aa, Artificial
  Nanobody sequence
EVQLVESGGGLVQAGGSLRLSCAASGRTFSRSAMGWFRQAPGKEREFVGFITGSGGTTYYGESVKGRFTISRDNAQNPVYLQMNSLKPEDTAVYYCGVYRRTHISSTYSESSEYDYWGQGTQVTVSSGGGGSGGGSEVQLVESGGGLVQPGNSLRLSCAASGFTFRSFGMSWVRQAPGKEPEWVSSISGSGSDTLYADSVKGRFTISRDNAKTTLYLQMNSLKPEDTAVYYCTIGGSLSRSSQGTQVTVSSGGGGSGGGSEVQLVESGGGLMQTGGSLRLSCAASGVTYSYYTASWFRQAPGKEREFVAAISPSGNTYYADSVKGRFTISRDNGKHTMYLQMNSLNPEDTAVYFCAIRATDSIYYASSYRHWGQGTQVTVSS

SEQ ID NO: 726 - protein, 387 aa, Artificial
  Nanobody sequence
EVQLVESGGGLVQAGGSLRLSCAASGRTFSRSAMGWFRQAPGKEREFVGFITGSGGTTYYGESVKGRFTISRDNAQNPVYLQMNSLKPEDTAVYYCGVYRRTHISSTYSESSEYDYWGQGTQVTVSSGGGGSGGGSEVQLVESGGGLVQPGNSLRLSCAASGFTFRSFGMSWVRQAPGKEPEWVSSISGSGSDTLYADSVKGRFTISRDNAKTTLYLQMNSLKPEDTAVYYCTIGGSLSRSSQGTQVTVSSGGGGSGGGSEVQLVESGGGLVQAGGSLRLTCAASGRTFRSYAMGWFRQAPGKEREFVAAINYSGGSTNYADSVKGRFTISRDNAKNTLYLQMNSLEPEDTAVYYCAAGSGYASLSYYSTERAYTYWGQGTQVTVSS

SEQ ID NO: 727 - protein, 386 aa, Artificial
  Nanobody sequence
EVQLVESGGGLVQAGGSLRLSCAASGRTFSRSAMGWFRQAPGKEREFVGFITGSGGTTYYGESVKGRFTISRDNAQNPVYLQMNSLKPEDTAVYYCGVYRRTHISSTYSESSEYDYWGQGTQVTVSSGGGGSGGGSEVQLVESGGGLVQPGNSLRLSCAASGFTFRSFGMSWVRQAPGKEPEWVSSISGSGSDTLYADSVKGRFTISRDNAKTTLYLQMNSLKPEDTAVYYCTIGGSLSRSSQGTQVTVSSGGGGSGGGSEVQLVESGGGLVQAGGSLRLSCAASGRTFRSYPMGWFRQAPGKEREFVASITGSGGSTYYADSVKGRFTISRDNAKNTVYLQMNSLRPEDTAVYSCAAYIRPDTYLSRDYRKYDYWGQGTQVTVSS

SEQ ID NO: 728 - protein, 386 aa, Artificial
  Nanobody sequence
EVQLVESGGGLVQAGGSLRLSCAASGRTFSRSAMGWFRQAPGKEREFVGFITGSGGTTYYGESVKGRFTISRDNAQNPVYLQMNSLKPEDTAVYYCGVYRRTHISSTYSESSEYDYWGQGTQVTVSSGGGGSGGGSEVQLVESGGGLVQPGNSLRLSCAASGFTFRSFGMSWVRQAPGKEPEWVSSISGSGSDTLYADSVKGRFTISRDNAKTTLYLQMNSLKPEDTAVYYCTIGGSLSRSSQGTQVTVSSGGGGSGGGSEVQLVESGGGLVQAGGSLRLSCAAAGGTFRNYVMGWFRQAPGKEREFVTAISTGGSWTGYVDSVKDRFTISRDNTKNTVYLQMASLKPEDTAVYYCAATTPATTYLPRSERQYDYWGQGTQVTVSS

SEQ ID NO: 729 - protein, 387 aa, Artificial
  Nanobody sequence
EVQLVESGGGLVQAGGSLRLSCAASGRTFSRSAMGWFRQAPGKEREFVGFITGSGGTTYYGESVKGRFTISRDNAQNPVYLQMNSLKPEDTAVYYCGVYRRTHISSTYSESSEYDYWGQGTQVTVSSGGGGSGGGSEVQLVESGGGLVQPGNSLRLSCAASGFTFRSFGMSWVRQAPGKEPEWVSSISGSGSDTLYADSVKGRFTISRDNAKTTLYLQMNSLKPEDTAVYYCTIGGSLSRSSQGTQVTVSSGGGGSGGGSEVQLVESGGGLVQAGGSLRLSCAASGRTFSRSAMGWFRQAPGKEREFVGFITGSGGTTYYGESVKGRFTISRDNAQNPVYLQMNSLKPEDTAVYYCGVYRRTYISSTYSESSEYDYWGQGTQVTVSS

SEQ ID NO: 730 - protein, 122 aa, Artificial
  Nanobody sequence
EVQLVESGGGLMQTGGSLRLSCAASGVTYSYYTASWFRQAPGKGREFVAAISPSGNTYYADSVKGRFTISRDNGKHTLYLQMNSLRPEDTAVYFCAIRATDSIYYASSYRHWGQGTLVTVSS

SEQ ID NO: 731 - protein, 122 aa, Artificial
  Nanobody sequence
EVQLVESGGGLVQTGGSLRLSCAASGVTYSYYTASWFRQAPGKGREFVAAISPSGNTYYADSVKGRFTISRDNGKHTLYLQMNSLRPEDTAVYFCAIRATDSIYYASSYRHWGQGTLVTVSS

SEQ ID NO: 732 - protein, 122 aa, Artificial
  Nanobody sequence
EVQLVESGGGLMQPGGSLRLSCAASGVTYSYYTASWFRQAPGKGREFVAAISPSGNTYYADSVKGRFTISRDNGKHTLYLQMNSLRPEDTAVYFCAIRATDSIYYASSYRHWGQGTLVTVSS

SEQ ID NO: 733 - protein, 122 aa, Artificial
  Nanobody sequence
EVQLVESGGGLMQTGGSLRLSCAASGVTYSYYTASWFRQAPGKGREFVAAISPSGNTYYADSVKGRFTISRDNSKHTLYLQMNSLRPEDTAVYFCAIRATDSIYYASSYRHWGQGTLVTVSS

SEQ ID NO: 734 - protein, 122 aa, Artificial
  Nanobody sequence
EVQLVESGGGLMQTGGSLRLSCAASGVTYSYYTASWFRQAPGKGREFVAAISPSGNTYYADSVKGRFTISRDNGKNTLYLQMNSLRPEDTAVYFCAIRATDSIYYASSYRHWGQGTLVTVSS

SEQ ID NO: 735 - protein, 122 aa, Artificial; identical to SEQ ID NO: 730
  Nanobody sequence

SEQ ID NO: 736 - protein, 127 aa, Artificial
  Nanobody sequence
EVQLVESGGGLVQPGGSLRLTCAASGRTFRSYAMGWFRQAPGKGREFVAAINYSGGSTNYADSVKGRFTISRDNAKNTLYLQMNSLEPEDTAVYYCAAGSGYASLSYYSTERAYTYWGQGTLVTVSS

SEQ ID NO: 737 - protein, 127 aa, Artificial
  Nanobody sequence
EVQLVESGGGLVQPGGSLRLSCAASGRTFRSYAMGWFRQAPGKGREFVAAINYSGGSTNYADSVKGRFTISRDNAKNTLYLQMNSLEPEDTAVYYCAAGSGYASLSYYSTERAYTYWGQGTLVTVSS

SEQ ID NO: 738 - protein, 127 aa, Artificial
  Nanobody sequence
EVQLVESGGGLVQPGGSLRLTCAASGRTFRSYAMGWFRQAPGKGREFVSAINYSGGSTNYADSVKGRFTISRDNAKNTLYLQMNSLEPEDTAVYYCAAGSGYASLSYYSTERAYTYWGQGTLVTVSS

SEQ ID NO: 739 - protein, 127 aa, Artificial
  Nanobody sequence
EVQLVESGGGLVQPGGSLRLTCAASGRTFRSYAMGWFRQAPGKGREFVAAINYSGGSTNYADSVKGRFTISRDNAKNTLYLQMNSLRPEDTAVYYCAAGSGYASLSYYSTERAYTYWGQGTLVTVSS

SEQ ID NO: 740 - protein, 127 aa, Artificial
  Nanobody sequence
EVQLVESGGGLVQPGGSLRLSCAASGRTFSRSAMGWFRQAPGKGREFVGFITGSGGTTYYGESVKGRFTISRDNAQNPVYLQMNSLRPEDTAVYYCGVYRRTYISSTYSESSEYDYWGQGTLVTVSS

SEQ ID NO: 741 - protein, 127 aa, Artificial
  Nanobody sequence
EVQLVESGGGLVQPGGSLRLSCAASGRTFSRSAMGWFRQAPGKGREFVGFITGSGGTTYYGESVKGRFTISRDNAQNTLYLQMNSLRPEDTAVYYCGVYRRTYISSTYSESSEYDYWGQGTLVTVSS

SEQ ID NO: 742 - protein, 127 aa, Artificial
  Nanobody sequence
EVQLVESGGGLVQPGGSLRLSCAASGRTFSRSAMGWFRQAPGKGREFVGFITGSGGTTYYADSVKGRFTISRDNAQNPVYLQMNSLRPEDTAVYYCGVYRRTYISSTYSESSEYDYWGQGTLVTVSS

SEQ ID NO: 743 - protein, 127 aa, Artificial
  Nanobody sequence
EVQLVESGGGLVQPGGSLRLSCAASGFTFSRSAMGWFRQAPGKGREFVGFITGSGGTTYYGESVKGRFTISRDNAQNPVYLQMNSLRPEDTAVYYCGVYRRTYISSTYSESSEYDYWGQGTLVTVSS

SEQ ID NO: 744 - protein, 127 aa, Artificial
  Nanobody sequence
EVQLVESGGGLVQPGGSLRLSCAASGRTFSRSAMGWFRQAPGKGREFVSFITGSGGTTYYGESVKGRFTISRDNAQNPVYLQMNSLRPEDTAVYYCGVYRRTYISSTYSESSEYDYWGQGTLVTVSS

SEQ ID NO: 745 - protein, 127 aa, Artificial
  Nanobody sequence
EVQLVESGGGLVQPGGSLRLSCAASGRTFSRSAMGWFRQAPGKGREFVGFITGSGGTTYYGESVKGRFTISRDNAQNPVYLQMNSLRPEDTAVYYCAVYRRTYISSTYSESSEYDYWGQGTLVTVSS

SEQ ID NO: 746 - protein, 126 aa, Artificial
  Nanobody sequence
EVQLVESGGGLVQPGGSLRLSCAAAGGTFRNYVMGWFRQAPGKGREFVTAISTGGSWTGYVDSVKDRFTISRDNTKNTLYLQMASLRPEDTAVYYCAATTPATTYLPRSERQYDYWGQGTLVTVSS

SEQ ID NO: 747 - protein, 126 aa, Artificial
  Nanobody sequence
EVQLVESGGGLVQPGGSLRLSCAASGGTFRNYVMGWFRQAPGKGREFVTAISTGGSWTGYVDSVKDRFTISRDNTKNTLYLQMASLRPEDTAVYYCAATTPATTYLPRSERQYDYWGQGTLVTVSS

SEQ ID NO: 748 - protein, 126 aa, Artificial
  Nanobody sequence
EVQLVESGGGLVQPGGSLRLSCAAAGGTFRNYVMGWFRQAPGKGREFVTAISTGGSWTGYVDSVKDRFTISRDNSKNTLYLQMASLRPEDTAVYYCAATTPATTYLPRSERQYDYWGQGTLVTVSS

SEQ ID NO: 749 - protein, 126 aa, Artificial
  Nanobody sequence
EVQLVESGGGLVQPGGSLRLSCAAAGGTFRNYVMGWFRQAPGKGREFVTAISTGGSWTGYVDSVKDRFTISRDNTKNTLYLQMNSLRPEDTAVYYCAATTPATTYLPRSERQYDYWGQGTLVTVSS

SEQ ID NO: 750 - protein, 126 aa, Artificial
  Nanobody sequence
EVQLVESGGGLVQPGGSLRLSCAASGRTFRSYPMGWFRQAPGKGREFVASITGSGGSTYYADSVKGRFTISRDNAKNTLYLQMNSLRPEDTAVYSCAAYIRPDTYLSRDYRKYDYWGQGTLVTVSS

SEQ ID NO: 751 - protein, 126 aa, Artificial
  Nanobody sequence
EVQLVESGGGLVQPGGSLRLSCAASGFTFRSYPMGWFRQAPGKGREFVASITGSGGSTYYADSVKGRFTISRDNAKNTLYLQMNSLRPEDTAVYSCAAYIRPDTYLSRDYRKYDYWGQGTLVTVSS

SEQ ID NO: 752 - protein, 126 aa, Artificial
  Nanobody sequence
EVQLVESGGGLVQPGGSLRLSCAASGRTFSSYPMGWFRQAPGKGREFVASITGSGGSTYYADSVKGRFTISRDNAKNTLYLQMNSLRPEDTAVYSCAAYIRPDTYLSRDYRKYDYWGQGTLVTVSS

SEQ ID NO: 753 - protein, 126 aa, Artificial
  Nanobody sequence
EVQLVESGGGLVQPGGSLRLSCAASGRTFRSYPMGWFRQAPGKGREFVSSITGSGGSTYYADSVKGRFTISRDNAKNTLYLQMNSLRPEDTAVYSCAAYIRPDTYLSRDYRKYDYWGQGTLVTVSS

SEQ ID NO: 754 - protein, 126 aa, Artificial
  Nanobody sequence
EVQLVESGGGLVQPGGSLRLSCAASGRTFRSYPMGWFRQAPGKGREFVASITGSGGSTYYADSVKGRFTISRDNAKNTLYLQMNSLRPEDTAVYYCAAYIRPDTYLSRDYRKYDYWGQGTLVTVSS

SEQ ID NO: 755 - protein, 126 aa, Artificial
  Nanobody sequence
EVQLVESGGGLVQPGGSLRLSCAASGFTFSSYPMGWFRQAPGKGREFVSSITGSGGSTYYADSVKGRFTISRDNAKNTLYLQMNSLRPEDTAVYYCAAYIRPDTYLSRDYRKYDYWGQGTLVTVSS

SEQ ID NO: 756 - protein, 126 aa, Artificial
  Nanobody sequence
EVQLVESGGGLVQPGGSLRLSCAASGFTFSSYPMGWFRQAPGKGREFVSSITGSGGSTYYAESVKGRFTISRDNAKNTLYLQMNSLRPEDTAVYYCAAYIRPDTYLSRDYRKYDYWGQGTLVTVSS

SEQ ID NO: 757 - protein, 127 aa, Artificial
  Nanobody sequence
EVQLVESGGGLVQPGGSLRLSCAASGRTFSRSAMGWFRQAPGKGREFVGFITGSGGTTYYADSVKGRFTISRDNAQNPVYLQMNSLRPEDTAVYYCAVYRRTYISSTYSESSEYDYWGQGTLVTVSS

SEQ ID NO: 758 - protein, 17 aa, Artificial
  Nanobody sequence
SITGSGGSTYYAESVKG

SEQ ID NO: 759 - protein, 385 aa, Artificial
  Nanobody sequence
EVQLVESGGGLVQPGGSLRLSCAASGFTFSSYPMGWFRQAPGKGREFVSSITGSGGSTYYADSVKGRFTISRDNAKNTLYLQMNSLRPEDTAVYYCAAYIRPDTYLSRDYRKYDYWGQGTLVTVSSGGGGSGGGSEVQLVESGGGLVQPGNSLRLSCAASGFTFSSFGMSWVRQAPGKGLEWVSSISGSGSDTLYADSVKGRFTISRDNAKTTLYLQMNSLRPEDTAVYYCTIGGSLSRSSQGTLVTVSSGGGGSGGGSEVQLVESGGGLVQPGGSLRLSCAASGFTFSSYPMGWFRQAPGKGREFVSSITGSGGSTYYADSVKGRFTISRDNAKNTLYLQMNSLRPEDTAVYYCAAYIRPDTYLSRDYRKYDYWGQGTLVTVSS

SEQ ID NO: 760 - protein, 387 aa, Artificial
  Nanobody sequence
EVQLVESGGGLVQPGGSLRLSCAASGRTFSRSAMGWFRQAPGKGREFVGFITGSGGTTYYADSVKGRFTISRDNAQNPVYLQMNSLRPEDTAVYYCAVYRRTYISSTYSESSEYDYWGQGTLVTVSSGGGGSGGGSEVQLVESGGGLVQPGNSLRLSCAASGFTFSSFGMSWVRQAPGKGLEWVSSISGSGSDTLYADSVKGRFTISRDNAKTTLYLQMNSLRPEDTAVYYCTIGGSLSRSSQGTLVTVSSGGGGSGGGSEVQLVESGGGLVQPGGSLRLSCAASGRTFSRSAMGWFRQAPGKGREFVGFITGSGGTTYYADSVKGRFTISRDNAQNPVYLQMNSLRPEDTAVYYCAVYRRTYISSTYSESSEYDYWGQGTLVTVSS

SEQ ID NO: 761 - protein, 265 aa, Artificial
  Nanobody sequence
EVQLVESGGGLVQPGGSLRLSCAASGFTFSSYPMGWFRQAPGKGREFVSSITGSGGSTYYADSVKGRFTISRDNAKNTLYLQMNSLRPEDTAVYYCAAYIRPDTYLSRDYRKYDYWGQGTLVTVSSGGGGSGGGSEVQLVESGGGLVQPGGSLRLSCAASGFTFSSYPMGWFRQAPGKGREFVSSITGSGGSTYYADSVKGRFTISRDNAKNTLYLQMNSLRPEDTAVYYCAAYIRPDTYLSRDYRKYDYWGQGTLVTVSSGGGC

SEQ ID NO: 762 - protein, 288 aa, Artificial
  Nanobody sequence
EVQLVESGGGLVQPGGSLRLSCAASGRTFSRSAMGWFRQAPGKGREFVGFITGSGGTTYYADSVKGRFTISRDNAQNPVYLQMNSLRPEDTAVYYCAVYRRTYISSTYSESSEYDYWGQGTLVTVSSGGGGSGGGGSGGGGSGGGGSGGGGSGGGGSEVQLVESGGGLVQPGGSLRLSCAASGRTFSRSAMGWFRQAPGKGREFVGFITGSGGTTYYADSVKGRFTISRDNAQNPVYLQMNSLRPEDTAVYYCAVYRRTYISSTYSESSEYDYWGQGTLVTVSSGGGC

SEQ ID NO: 763 - protein, 98 aa, Artificial
  Variable domain sequence
EVQLLESGGGLVQPGGSLRLSCAASGFTFSSYAMSWVRQAPGKGLEWVSAISGSGGSTYYADSVKGRFTISRDNSKNTLYLQMNSLRAEDTAVYYCAR

SEQ ID NO: 764 - protein, 11 aa, Artificial
  FR4 sequence
WGQGTLVTVSS

SEQ ID NO: 765 - protein, 127 aa, Artificial
  Nanobody sequence
EVQLVESGGGLVQPGGSLRLSCAASGRTFSRSAMGWFRQAPGKGREFVGFITGSGGTTYYADSVKGRFTISRDNAQNPLYLQMNSLRPEDTAVYYCAVYRRTYISSTYSESSEYDYWGQGTLVTVSS

SEQ ID NO: 766 - protein, 281 aa, Artificial
  Nanobody sequence
EVQLVESGGGLVQAGGSLRLSCAASGRTFRSYPMGWFRQAPGKEREFVASITGSGGSTYYADSVKGRFTISRDNAKNTVYLQMNSLRPEDTAVYSCAAYIRPDTYLSRDYRKYDYWGQGTQVTVSSGGGGSGGGGSGGGGSGGGGSGGGGSGGGGSEVQLVESGGGLVQAGGSLRLSCAASGRTFRSYPMGWFRQAPGKEREFVASITGSGGSTYYADSVKGRFTISRDNAKNTVYLQMNSLRPEDTAVYSCAAYIRPDTYLSRDYRKYDYWGQGTQVTVS

SEQ ID NO: 767 - protein, 284 aa, Artificial
  Nanobody sequence
EVQLVESGGGLVQAGGSLRLSCAASGRTFSRSAMGWFRQAPGKEREFVGFITGSGGTTYYGESVKGRFTISRDNAQNPVYLQMNSLKPEDTAVYYCGVYRRTYISSTYSESSEYDYWGQGTQVTVSSGGGGSGGGGSGGGGSGGGGSGGGGSGGGGSEVQLVESGGGLVQAGGSLRLSCAASGRTFSRSAMGWFRQAPGKEREFVGFITGSGGTTYYGESVKGRFTISRDNAQNPVYLQMNSLKPEDTAVYYCGVYRRTYISSTYSESSEYDYWGQGTQVTVSS

SEQ ID NO: 768 - protein, 279 aa, Artificial
  Nanobody sequence
EVQLVESGGGLVQPGGSLRLSCAASGRTFSRSAMGWFRQAPGKGREFVGFITGSGGTTYYADSVKGRFTISRDNAQNPVYLQMNSLRPEDTAVYYCAVYRRTYISSTYSESSEYDYWGQGTLVTVSSGGGGSGGGGSGGGGSGGGGSGGGGSEVQLVESGGGLVQPGGSLRLSCAASGRTFSRSAMGWFRQAPGKGREFVGFITGSGGTTYYADSVKGRFTISRDNAQNPVYLQMNSLRPEDTAVYYCAVYRRTYISSTYSESSEYDYWGQGTLVTVSS

SEQ ID NO: 769 - protein, 284 aa, Artificial
  Nanobody sequence
EVQLVESGGGLVQPGGSLRLSCAASGRTFSRSAMGWFRQAPGKGREFVGFITGSGGTTYYADSVKGRFTISRDNAQNPVYLQMNSLRPEDTAVYYCAVYRRTYISSTYSESSEYDYWGQGTLVTVSSGGGGSGGGGSGGGGSGGGGSGGGGSGGGGSEVQLVESGGGLVQPGGSLRLSCAASGRTFSRSAMGWFRQAPGKGREFVGFITGSGGTTYYADSVKGRFTISRDNAQNPVYLQMNSLRPEDTAVYYCAVYRRTYISSTYSESSEYDYWGQGTLVTVSS

SEQ ID NO: 770 - protein, 284 aa, Artificial
  Nanobody sequence
EVQLVESGGGLVQAGGSLRLTCAASGRTFRSYAMGWFRQAPGKEREFVAAINYSGGSTNYADSVKGRFTISRDNAKNTLYLQMNSLEPEDTAVYYCAAGSGYASLSYYSTERAYTYWGQGTQVTVSSGGGGSGGGGSGGGGSGGGGSGGGGSGGGGSEVQLVESGGGLVQAGGSLRLTCAASGRTFRSYAMGWFRQAPGKEREFVAAINYSGGSTNYADSVKGRFTISRDNAKNTLYLQMNSLEPEDTAVYYCAAGSGYASLSYYSTERAYTYWGQGTQVTVSS

SEQ ID NO: 771 - protein, 269 aa, Artificial
  Nanobody sequence
EVQLVESGGGLVQAGGSLRLTCAASGRTFRSYAMGWFRQAPGKEREFVAAINYSGGSTNYADSVKGRFTISRDNAKNTLYLQMNSLEPEDTAVYYCAAGSGYASLSYYSTERAYTYWGQGTQVTVSSGGGGSGGGGSGGGGSEVQLVESGGGLVQAGGSLRLTCAASGRTFRSYAMGWFRQAPGKEREFVAAINYSGGSTNYADSVKGRFTISRDNAKNTLYLQMNSLEPEDTAVYYCAAGSGYASLSYYSTERAYTYWGQGTQVTVSS

SEQ ID NO: 772 - protein, 846 aa, Artificial
  Nanobody sequence
EVQLVESGGGLVQPGGSLRLSCAASGFTFSSYPMGWFRQAPGKGREFVSSITGSGGSTYYADSVKGRFTISRDNAKNTLYLQMNSLRPEDTAVYYCAAYIRPDTYLSRDYRKYDYWGQGTLVTVSSGGGGSGGGSEVQLVESGGGLVQPGGSLRLSCAASGFTFSSYPMGWFRQAPGKGREFVSSITGSGGSTYYADSVKGRFTISRDNAKNTLYLQMNSLRPEDTAVYYCAAYIRPDTYLSRDYRKYDYWGQGTLVTVSSDAHKSEVAHRFKDLGEENFKALVLIAFAQYLQQCPFEDHVKLVNEVTEFAKTCVADESAENCDKSLHTLFGDKLCTVATLRETYGEMADCCAKQEPERNECFLQHKDDNPNLPRLVRPEVDVMCTAFHDNEETFLKKYLYEIARRHPYFYAPELLFFAKRYKAAFTECCQAADKAACLLPKLDELRDEGKASSAKQRLKCASLQKFGERAFKAWAVARLSQRFPKAEFAEVSKLVTDLTKVHTECCHGDLLECADDRADLAKYICENQDSISSKLKECCEKPLLEKSHCIAEVENDEMPADLPSLAADFVESKDVCKNYAEAKDVFLGMFLYEYARRHPDYSVVLLLRLAKTYETTLEKCCAAADPHECYAKVFDEFKPLVEEPQNLIKQNCELFEQLGEYKFQNALLVRYTKKVPQVSTPTLVEVSRNLGKVGSKCCKHPEAKRMPCAEDYLSVVLNQLCVLHEKTPVSDRVTKCCTESLVNRRPCFSALEVDETYVPKEFNAETFTFHADICTLSEKERQIKKQTALVELVKHKPKATKEQLKAVMDDFAAFVEKCCKADDKETCFAEEGKKLVAASQAALGL

SEQ ID NO: 773 - protein, 869 aa, Artificial [sequence omitted]

SEQ ID NO: 774 - protein, 376 aa, Artificial
  Nanobody sequence
EVQLVESGGGLVQPGGSLRLSCAASGFTFSSYPMGWFRQAPGKGREFVSSITGSGGSTYYADSVKGRFTISRDNAKNTLYLQMNSLRPEDTAVYYCAAYIRPDTYLSRDYRKYDYWGQGTLVTVSSGGGGSGGGSGGGGSGGGSEPKSSDKTHTCPPCPAPELLGGPSVFLFPPKPKDTLMISRTPEVTCVVVDVSHEDPEVKFNWYVDGVEVHNAKTKPREEQYNSTYRVVSVLTVLHQDWLNGKEYKCKVSNKALPAPIEKTISKAKGQPREPQVYTLPPSRDELTKNQVSLTCLVKGFYPSDIAVEWESNGQPENNYKTTPPVLDSDGPFFLYSKLTVDKSRWQQGNVFSCSVMHEALHNHYTQKSLSLSPGK

SEQ ID NO: 775 - protein, 376 aa, Artificial
  Nanobody sequence
EVQLVESGGGLVQPGGSLRLSCAASGFTFSSYPMGWFRQAPGKGREFVSSITGSGGSTYYADSVKGRFTISRDNAKNTLYLQMNSLRPEDTAVYYCAAYIRPDTYLSRDYRKYDYWGQGTLVTVSSGGGGSGGGSGGGGSGGGSGGGGSDKTHTCPPCPAPELLGGPSVFLFPPKPKDTLMISRTPEVTCVVVDVSHEDPEVKFNWYVDGVEVHNAKTKPREEQYNSTYRVVSVLTVLHQDWLNGKEYKCKVSNKALPAPIEKTISKAKGQPREPQVYTLPPSRDELTKNQVSLTCLVKGFYPSDIAVEWESNGQPENNYKTTPPVLDSDGPFFLYSKLTVDKSRWQQGNVFSCSVMHEALHNHYTQKSLSLSPGK

SEQ ID NO: 776 - protein, 376 aa, Artificial
  Nanobody sequence
EVQLVESGGGLVQPGGSLRLSCAASGFTFSSYPMGWFRQAPGKGREFVSSITGSGGSTYYADSVKGRFTISRDNAKNTLYLQMNSLRPEDTAVYYCAAYIRPDTYLSRDYRKYDYWGQGTLVTVSSGGGGSGGGSGGGGSGGGSGGGGSGGGGSCPPCPAPELLGGPSVFLFPPKPKDTLMISRTPEVTCVVVDVSHEDPEVKFNWYVDGVEVHNAKTKPREEQYNSTYRVVSVLTVLHQDWLNGKEYKCKVSNKALPAPIEKTISKAKGQPREPQVYTLPPSRDELTKNQVSLTCLVKGFYPSDIAVEWESNGQPENNYKTTPPVLDSDGPFFLYSKLTVDKSRWQQGNVFSCSVMHEALHNHYTQKSLSLSPGK

SEQ ID NO: 777 - protein, 348 aa, Artificial
  Nanobody sequence
EVQLVESGGGLVQPGGSLRLSCAASGFTFSSYPMGWFRQAPGKGREFVSSITGSGGSTYYADSVKGRFTISRDNAKNTLYLQMNSLRPEDTAVYYCAAYIRPDTYLSRDYRKYDYWGQGTLVTVSSCPPCPAPELLGGPSVFLFPPKPKDTLMISRTPEVTCVVVDVSHEDPEVKFNWYVDGVEVHNAKTKPREEQYNSTYRVVSVLTVLHQDWLNGKEYKCKVSNKALPAPIEKTISKAKGQPREPQVYTLPPSRDELTKNQVSLTCLVKGFYPSDIAVEWESNGQPENNYKTTPPVLDSDGPFFLYSKLTVDKSRWQQGNVFSCSVMHEALHNHYTQKSLSLSPGK

SEQ ID NO: 778 - protein, 376 aa, Artificial
  Nanobody sequence
EVQLVESGGGLVQPGGSLRLSCAASGFTFSSYPMGWFRQAPGKGREFVSSITGSGGSTYYADSVKGRFTISRDNAKNTLYLQMNSLRPEDTAVYYCAAYIRPDTYLSRDYRKYDYWGQGTLVTVSSGGGGSGGGSGGGGSGGGSGGGSERKCCVECPPCPAPPVAGPSVFLFPPKPKDTLMISRTPEVTCVVVDVSHEDPEVQFNWYVDGMEVHNAKTKPREEQFNSTFRVVSVLTVVHQDWLNGKEYKCKVSNKGLPAPIEKTISKTKGQPREPQVYTLPPSREEMTKNQVSLTCLVKGFYPSDIAVEWESNGQPENNYKTTPPMLDSDGSFFLYSKLTVDKSRWQQGNVFSCSVMHEALHNHYTQKSLSLSPGK

SEQ ID NO: 779 - protein, 381 aa, Artificial
  Nanobody sequence
EVQLVESGGGLVQPGGSLRLSCAASGFTFSSYPMGWFRQAPGKGREFVSSITGSGGSTYYADSVKGRFTISRDNAKNTLYLQMNSLRPEDTAVYYCAAYIRPDTYLSRDYRKYDYWGQGTLVTVSSGGGGSGGGSGGGGSGGGSGGGGSGGGSGGSCCVECPPCPAPPVAGPSVFLFPPKPKDTLMISRTPEVTCVVVDVSHEDPEVQFNWYVDGMEVHNAKTKPREEQFNSTFRVVSVLTVVHQDWLNGKEYKCKVSNKGLPAPIEKTISKTKGQPREPQVYTLPPSREEMTKNQVSLTCLVKGFYPSDIAVEWESNGQPENNYKTTPPMLDSDGSFFLYSKLTVDKSRWQQGNVFSCSVMHEALHNHYTQKSLSLSPGK

SEQ ID NO: 780 - protein, 385 aa, Artificial
  Nanobody sequence
EVQLVESGGGLVQPGGSLRLSCAASGFTFSSYPMGWFRQAPGKGREFVSSITGSGGSTYYADSVKGRFTISRDNAKNTLYLQMNSLRPEDTAVYYCAAYIRPDTYLSRDYRKYDYWGQGTLVTVSSGGGGSGGGSGGGGSGGGSGGGGSGGGSGGGSGGSCCVECPPCPAPPVAGPSVFLFPPKPKDTLMISRTPEVTCVVVDVSHEDPEVQFNWYVDGMEVHNAKTKPREEQFNSTFRVVSVLTVVHQDWLNGKEYKCKVSNKGLPAPIEKTISKTKGQPREPQVYTLPPSREEMTKNQVSLTCLVKGFYPSDIAVEWESNGQPENNYKTTPPMLDSDGSFFLYSKLTVDKSRWQQGNVFSCSVMHEALHNHYTQKSLSLSPGK

SEQ ID NO: 781 - protein, 351 aa, Artificial
  Nanobody sequence
EVQLVESGGGLVQPGGSLRLSCAASGFTFSSYPMGWFRQAPGKGREFVSSITGSGGSTYYADSVKGRFTISRDNAKNTLYLQMNSLRPEDTAVYYCAAYIRPDTYLSRDYRKYDYWGQGTLVTVSSCCVECPPCPAPPVAGPSVFLFPPKPKDTLMISRTPEVTCVVVDVSHEDPEVQFNWYVDGMEVHNAKTKPREEQFNSTFRVVSVLTVVHQDWLNGKEYKCKVSNKGLPAPIEKTISKTKGQPREPQVYTLPPSREEMTKNQVSLTCLVKGFYPSDIAVEWESNGQPENNYKTTPPMLDSDGSFFLYSKLTVDKSRWQQGNVFSCSVMHEALHNHYTQKSLSLSPGK

SEQ ID NO: 782 - protein, 377 aa, Artificial
  Nanobody sequence
EVQLVESGGGLVQPGGSLRLSCAASGRTFSRSAMGWFRQAPGKGREFVGFITGSGGTTYYADSVKGRFTISRDNAQNPVYLQMNSLRPEDTAVYYCAVYRRTYISSTYSESSEYDYWGQGTLVTVSSGGGGSGGGSGGGGSGGGSEPKSSDKTHTCPPCPAPELLGGPSVFLFPPKPKDTLMISRTPEVTCVVVDVSHEDPEVKFNWYVDGVEVHNAKTKPREEQYNSTYRVVSVLTVLHQDWLNGKEYKCKVSNKALPAPIEKTISKAKGQPREPQVYTLPPSRDELTKNQVSLTCLVKGFYPSDIAVEWESNGQPENNYKTTPPVLDSDGPFFLYSKLTVDKSRWQQGNVFSCSVMHEALHNHYTQKSLSLSPGK

SEQ ID NO: 783 - protein, 377 aa, Artificial
  Nanobody sequence
EVQLVESGGGLVQPGGSLRLSCAASGRTFSRSAMGWFRQAPGKGREFVGFITGSGGTTYYADSVKGRFTISRDNAQNPVYLQMNSLRPEDTAVYYCAVYRRTYISSTYSESSEYDYWGQGTLVTVSSGGGGSGGGSGGGGSGGGSGGGGSDKTHTCPPCPAPELLGGPSVFLFPPKPKDTLMISRTPEVTCVVVDVSHEDPEVKFNWYVDGVEVHNAKTKPREEQYNSTYRVVSVLTVLHQDWLNGKEYKCKVSNKALPAPIEKTISKAKGQPREPQVYTLPPSRDELTKNQVSLTCLVKGFYPSDIAVEWESNGQPENNYKTTPPVLDSDGPFFLYSKLTVDKSRWQQGNVFSCSVMHEALHNHYTQKSLSLSPGK

SEQ ID NO: 784 - protein, 377 aa, Artificial
  Nanobody sequence
EVQLVESGGGLVQPGGSLRLSCAASGRTFSRSAMGWFRQAPGKGREFVGFITGSGGTTYYADSVKGRFTISRDNAQNPVYLQMNSLRPEDTAVYYCAVYRRTYISSTYSESSEYDYWGQGTLVTVSSGGGGSGGGSGGGGSGGGSGGGGSGGGGSCPPCPAPELLGGPSVFLFPPKPKDTLMISRTPEVTCVVVDVSHEDPEVKFNWYVDGVEVHNAKTKPREEQYNSTYRVVSVLTVLHQDWLNGKEYKCKVSNKALPAPIEKTISKAKGQPREPQVYTLPPSRDELTKNQVSLTCLVKGFYPSDIAVEWESNGQPENNYKTTPPVLDSDGPFFLYSKLTVDKSRWQQGNVFSCSVMHEALHNHYTQKSLSLSPGK

SEQ ID NO: 785 - protein, 349 aa, Artificial
  Nanobody sequence
EVQLVESGGGLVQPGGSLRLSCAASGRTFSRSAMGWFRQAPGKGREFVGFITGSGGTTYYADSVKGRFTISRDNAQNPVYLQMNSLRPEDTAVYYCAVYRRTYISSTYSESSEYDYWGQGTLVTVSSCPPCPAPELLGGPSVFLFPPKPKDTLMISRTPEVTCVVVDVSHEDPEVKFNWYVDGVEVHNAKTKPREEQYNSTYRVVSVLTVLHQDWLNGKEYKCKVSNKALPAPIEKTISKAKGQPREPQVYTLPPSRDELTKNQVSLTCLVKGFYPSDIAVEWESNGQPENNYKTTPPVLDSDGPFFLYSKLTVDKSRWQQGNVFSCSVMHEALHNHYTQKSLSLSPGK

SEQ ID NO: 786 - protein, 377 aa, Artificial
  Nanobody sequence
EVQLVESGGGLVQPGGSLRLSCAASGRTFSRSAMGWFRQAPGKGREFVGFITGSGGTTYYADSVKGRFTISRDNAQNPVYLQMNSLRPEDTAVYYCAVYRRTYISSTYSESSEYDYWGQGTLVTVSSGGGGSGGGSGGGGSGGGSGGGSERKCCVECPPCPAPPVAGPSVFLFPPKPKDTLMISRTPEVTCVVVDVSHEDPEVQFNWYVDGMEVHNAKTKPREEQFNSTFRVVSVLTVVHQDWLNGKEYKCKVSNKGLPAPIEKTISKTKGQPREPQVYTLPPSREEMTKNQVSLTCLVKGFYPSDIAVEWESNGQPENNYKTTPPMLDSDGSFFLYSKLTVDKSRWQQGNVFSCSVMHEALHNHYTQKSLSLSPGK

SEQ ID NO: 787 - protein, 382 aa, Artificial
  Nanobody sequence
EVQLVESGGGLVQPGGSLRLSCAASGRTFSRSAMGWFRQAPGKGREFVGFITGSGGTTYYADSVKGRFTISRDNAQNPVYLQMNSLRPEDTAVYYCAVYRRTYISSTYSESSEYDYWGQGTLVTVSSGGGGSGGGSGGGGSGGGSGGGGSGGGSGGSCCVECPPCPAPPVAGPSVFLFPPKPKDTLMISRTPEVTCVVVDVSHEDPEVQFNWYVDGMEVHNAKTKPREEQFNSTFRVVSVLTVVHQDWLNGKEYKCKVSNKGLPAPIEKTISKTKGQPREPQVYTLPPSREEMTKNQVSLTCLVKGFYPSDIAVEWESNGQPENNYKTTPPMLDSDGSFFLYSKLTVDKSRWQQGNVFSCSVMHEALHNHYTQKSLSLSPGK

SEQ ID NO: 788 - protein, 386 aa, Artificial
  Nanobody sequence
EVQLVESGGGLVQPGGSLRLSCAASGRTFSRSAMGWFRQAPGKGREFVGFITGSGGTTYYADSVKGRFTISRDNAQNPVYLQMNSLRPEDTAVYYCAVYRRTYISSTYSESSEYDYWGQGTLVTVSSGGGGSGGGSGGGGSGGGSGGGGSGGGSGGGSGGSCCVECPPCPAPPVAGPSVFLFPPKPKDTLMISRTPEVTCVVVDVSHEDPEVQFNWYVDGMEVHNAKTKPREEQFNSTFRVVSVLTVVHQDWLNGKEYKCKVSNKGLPAPIEKTISKTKGQPREPQVYTLPPSREEMTKNQVSLTCLVKGFYPSDIAVEWESNGQPENNYKTTPPMLDSDGSFFLYSKLTVDKSRWQQGNVFSCSVMHEALHNHYTQKSLSLSPGK

SEQ ID NO: 789 - protein, 352 aa, Artificial
  Nanobody sequence
EVQLVESGGGLVQPGGSLRLSCAASGRTFSRSAMGWFRQAPGKGREFVGFITGSGGTTYYADSVKGRFTISRDNAQNPVYLQMNSLRPEDTAVYYCAVYRRTYISSTYSESSEYDYWGQGTLVTVSSCCVECPPCPAPPVAGPSVFLFPPKPKDTLMISRTPEVTCVVVDVSHEDPEVQFNWYVDGMEVHNAKTKPREEQFNSTFRVVSVLTVVHQDWLNGKEYKCKVSNKGLPAPIEKTISKTKGQPREPQVYTLPPSREEMTKNQVSLTCLVKGFYPSDIAVEWESNGQPENNYKTTPPMLDSDGSFFLYSKLTVDKSRWQQGNVFSCSVMHEALHNHYTQKSLSLSPGK

SEQ ID NO: 790 - protein, 115 aa, Artificial [sequence omitted]

SEQ ID NO: 791 - protein, 115 aa, Artificial [sequence omitted]

SEQ ID NO: 792 - protein, 9 aa, Artificial
  Linker sequence
GGGGSGGGS

SEQ ID NO: 793 - protein, 15 aa, Artificial
  Linker sequence
GGGGSGGGGSGGGGS

SEQ ID NO: 794 - protein, 20 aa, Artificial
  Linker sequence
GGGGSGGGGSGGGGSGGGGS

SEQ ID NO: 795 - protein, 25 aa, Artificial
  Linker sequence
GGGGSGGGGSGGGGSGGGGSGGGGS

SEQ ID NO: 796 - protein, 30 aa, Artificial
  Linker sequence
GGGGSGGGGSGGGGSGGGGSGGGGSGGGGS

SEQ ID NO: 797 - DNA, 30 bp, Artificial
  Primer sequence
cctccctttgacggattccgcgtaatacgt

SEQ ID NO: 798 - DNA, 30 bp, Artificial
  Primer sequence
acgtattacgcggattccgtcaaagggagg

SEQ ID NO: 799 - DNA, 22 bp, Artificial
  Primer sequence
aaggctagagtacttaatacga

SEQ ID NO: 800 - DNA, 21 bp, Artificial
  Primer sequence
cttatcatgtctgctcgaagc

SEQ ID NO: 801 - DNA, 42 bp, Artificial
  Primer sequence
gggaaccagatgggatggaggcggcattaatagtgagatgag

SEQ ID NO: 802 - DNA, 42 bp, Artificial
  Primer sequence
ctcatctcactattaatgccgcctccatcccatctggttccc

SEQ ID NO: 803 - DNA, 46 bp, Artificial
  Primer sequence
ccattagttgaagatactctgtagccacgcttcctgaagtttcatg

SEQ ID NO: 804 - DNA, 46 bp, Artificial
  Primer sequence
catgaaacttcaggaagcgtggctacagagtatcttcaactaatgg

SEQ ID NO: 805 - DNA, 34 bp, Artificial
  Primer sequence
ccattagttgaagatagtctgtaggtaggtctcc

SEQ ID NO: 806 - DNA, 34 bp, Artificial
  Primer sequence
ggagacctacctacagactatcttcaactaatgg

SEQ ID NO: 807 - DNA, 69 bp, Artificial
  Primer sequence
gaagtaggatggacgatgacaaacccgcgaagacttttctggtggcgggagcgaggtgcagctggtgga

SEQ ID NO: 808 - DNA, 51 bp, Artificial
  Primer sequence
gttctatcgggaagacttagaacctccgccgcctgaggagacggtgaccag

SEQ ID NO: 809 - DNA, 44 bp, Artificial
  Primer sequence
gggtatctctcgagaaaagagaggtgcagctggtggagtctggg

SEQ ID NO: 810 - DNA, 70 bp, Artificial
  Primer sequence
tctcttctcctaggtctttgaatctgtgggcgacttcagatttatgagcatctgaggagacggtgaccag

SEQ ID NO: 811 - DNA, 41 bp, Artificial
  Primer sequence
gggtatctctcgagaaaagagaggttcagctagtggaatca

SEQ ID NO: 812 - DNA, 70 bp, Artificial
  Primer sequence
cacctccggatcctccacctccgctacctccacctccactgccacctccacctgaggagacggtgaccag

SEQ ID NO: 813 - DNA, 75 bp, Artificial
  Primer sequence
ggtggaggatccggaggtggaggtagcggaggtggaggctcaggaggtggaggcagtgaggttcagctagtggaa

SEQ ID NO: 814 - DNA, 70 bp, Artificial; identical to SEQ ID NO: 810
  Primer sequence

SEQ ID NO: 815 - protein, 392 aa, Artificial
  Nanobody sequence
DVQLQASGGGSVQAGGSLRLSCAASGYTIGPYCMGWFRQAPGKEREGVAAINMGGGITYYADSVKGRFTISQDNAKNTVYLLMNSLEPEDTAIYYCAADSTIYASYYECGHGLSTGGYGYDSWGQGTQVTVSSGGGGSGGGSEVQLVESGGGLVQPGNSLRLSCAASGFTFSSFGMSWVRQAPGKGLEWVSSISGSGSDTLYADSVKGRFTISRDNAKTTLYLQMNSLRPEDTAVYYCTIGGSLSRSSQGTLVTVSSGGGGSGGGSEVQLVESGGGLVQPGGSLRLSCAASGFTFSSYPMGWFRQAPGKGREFVSSITGSGGSTYYADSVKGRFTISRDNAKNTLYLQMNSLRPEDTAVYYCAAYIRPDTYLSRDYRKYDYWGQGTLVTVSS

SEQ ID NO: 816 - protein, 399 aa, Artificial
  Nanobody sequence
EVQLVESGGGLVQPGGSLRLSCAASGFTFSSYPMGWFRQAPGKGREFVSSITGSGGSTYYADSVKGRFTISRDNAKNTLYLQMNSLRPEDTAVYYCAAYIRPDTYLSRDYRKYDYWGQGTLVTVSSGGGGSGGGSDVQLQASGGGSVQAGGSLRLSCAASGYTIGPYCMGWFRQAPGKEREGVAAINMGGGITYYADSVKGRFTISQDNAKNTVYLLMNSLEPEDTAIYYCAADSTIYASYYECGHGLSTGGYGYDSWGQGTQVTVSSGGGGSGGGSEVQLVESGGGLVQPGGSLRLSCAASGFTFSSYPMGWFRQAPGKGREFVSSITGSGGSTYYADSVKGRFTISRDNAKNTLYLQMNSLRPEDTAVYYCAAYIRPDTYLSRDYRKYDYWGQGTLV

1. Multivalent polypeptide, compound or construct comprising or essentially consisting of at least two amino acid sequences and/or Nanobodies that are directed against and/or that can specifically bind to RANK-L.

2. Multivalent polypeptide, compound or construct according to claim 1, wherein the at least two amino acid sequences and/or Nanobodies are directed against and/or can specifically bind to the RANK receptor binding site on RANK-L.

3. Multivalent polypeptide, compound or construct according to claim 1, wherein the at least two amino acid sequences and/or Nanobodies are directed against and/or can specifically bind to the intersubunit receptor-binding grooves on the RANK-L trimer.

4. Multivalent polypeptide, compound or construct according to claim 1, wherein the at least two amino acid sequences and/or Nanobodies modulate binding of RANKL-L to RANK.

5. Multivalent polypeptide, compound or construct according to claim 1, wherein the at least two amino acid sequences and/or Nanobodies inhibit and/or prevent binding of RANKL-L to RANK.

6. Multivalent polypeptide, compound or construct according to claim 1, wherein the at least two amino acid sequences and/or Nanobodies inhibit and/or prevent binding of RANKL-L to RANK, while not reducing and/or inhibiting the RANK-L/OPG interaction.

7. Multivalent polypeptide, compound or construct according to claim 1, wherein the at least two amino acid sequences and/or Nanobodies are antagonists of RANK-L.

8. Multivalent polypeptide, compound or construct according to claim 1, wherein the at least two amino acid sequences and/or Nanobodies are directed against and/or can specifically bind to the OPG binding site on RANK-L.

9. Multivalent polypeptide, compound or construct according to claim 1, wherein the at least two amino acid sequences and/or Nanobodies modulate binding of RANKL-L to OPG.

10. Multivalent polypeptide, compound or construct according to claim 1, wherein the at least two amino acid sequences and/or Nanobodies prevent and/or inhibit the differentiation and/or proliferation of osteoclasts.

11. Multivalent polypeptide, compound or construct according to claim 1, wherein the at least two amino acid sequences and/or Nanobodies modulate bone remodelling.

12. Multivalent polypeptide, compound or construct according to claim 1, which is a bivalent polypeptide, compound or construct.

13. Multivalent polypeptide, compound or construct according to claim 1, wherein the at least two amino acid sequences comprise an immunoglobulin fold or under suitable conditions are capable of forming an immunoglobulin fold.

14. Multivalent polypeptide, compound or construct according to claim 1, wherein the at least two amino acid sequences essentially consists of 4 framework regions (FR1 to FR4 respectively) and 3 complementarity determining regions (CDR1 to CDR3 respectively).

15. Multivalent polypeptide, compound or construct according to claim 1, wherein the at least two amino acid sequences are immunoglobulin sequences.

16. Multivalent polypeptide, compound or construct according to claim 1, wherein the at least two amino acid sequences are a humanized immunoglobulin sequence, a camelized immunoglobulin sequence or an immunoglobulin sequence that has been obtained by techniques such as affinity maturation.

17. Multivalent polypeptide, compound or construct according to claim 1, wherein the at least two amino acid sequences essentially consist of a light chain variable domain sequence (e.g. a V_{L}-sequence); or of a heavy chain variable domain sequence (e.g. a V_{H}-sequence).

18. Multivalent polypeptide, compound or construct according to claim 1, wherein the at least two amino acid sequences essentially consists of a heavy chain variable domain sequence that is derived from a conventional four-chain antibody or that essentially consist of a heavy chain variable domain sequence that is derived from a heavy chain antibody.

19. Multivalent polypeptide, compound or construct according to claim 1, wherein the at least two amino acid sequences essentially consists of a domain antibody (or an amino acid sequence that is suitable for use as a domain antibody), of a single domain antibody (or an amino acid sequence that is suitable for use as a single domain antibody), of a “dAb” (or an amino acid sequence that is suitable for use as a dAb) or of a Nanobody (including but not limited to a V_{HH} sequence).

20. Multivalent polypeptide, compound or construct according to claim 1, wherein the at least two Nanobodies are a V_{HH} sequence, a partially humanized V_{HH} sequence, a fully humanized V_{HH} sequence, a camelized heavy chain variable domain or a Nanobody that has been obtained by techniques such as affinity maturation.

21. Multivalent polypeptide, compound or construct according to claim 1, wherein the at least two amino acid sequences essentially consist of a Nanobody that
i) has at least 80% amino acid identity with at least one of the amino acid sequences of SEQ ID NO's: 1 to 22, in which for the purposes of determining the degree of amino acid identity, the amino acid residues that form the CDR sequences are disregarded;
and in which:
ii) preferably one or more of the amino acid residues at positions 11, 37, 44, 45, 47, 83, 84, 103, 104 and 108 according to the Kabat numbering are chosen from the Hallmark residues mentioned in Table A-3.

22. Multivalent polypeptide, compound or construct according to claim 1, wherein the at least two amino acid sequences essentially consist of a Nanobody that
i) has at least 80% amino acid identity with at least one of the amino acid sequences of SEQ ID NO's: 560-621 and 730-757 and 765, in which for the purposes of determining the degree of amino acid identity, the amino acid residues that form the CDR sequences are disregarded;
and in which:
ii) preferably one or more of the amino acid residues at positions 11, 37, 44, 45, 47, 83, 84, 103, 104 and 108 according to the Kabat numbering are chosen from the Hallmark residues mentioned in Table A-3.

23. Multivalent polypeptide, compound or construct according to claim 1, that essentially consists of a polypeptide that
i) has at least 80% amino acid identity with at least one of the amino acid sequences of SEQ ID NO's: 622-729, 759-762 and 766-773, in which for the purposes of determining the degree of amino acid identity, the amino acid residues that form the CDR sequences are disregarded;
and in which:
ii) preferably one or more of the amino acid residues at positions 11, 37, 44, 45, 47, 83, 84, 103, 104 and 108 according to the Kabat numbering are chosen from the Hallmark residues mentioned in Table A-3.

24. Multivalent polypeptide, compound or construct according to claim 1, wherein the at least two amino acid sequences essentially consist of a partially humanized Nanobody or a fully humanized Nanobody.

25. Multivalent polypeptide, compound or construct according to claim 1, wherein the at least two amino acid sequences and/or Nanobodies comprise one or more stretches of amino acid residues (and/or CDR sequences) chosen from the group consisting of:
a) the amino acid sequences of SEQ ID NO's: 188-249;
b) amino acid sequences that have at least 80% amino acid identity with at least one of the amino acid sequences of SEQ ID NO's: 188-249;
c) amino acid sequences that have 3, 2, or 1 amino acid difference with at least one of the amino acid sequences of SEQ ID NO's: 188-249;
d) the amino acid sequences of SEQ ID NO's: 312-373 and 758;
e) amino acid sequences that have at least 80% amino acid identity with at least one of the amino acid sequences of SEQ ID NO's: 312-373 and 758;
f) amino acid sequences that have 3, 2, or 1 amino acid difference with at least one of the amino acid sequences of SEQ ID NO's: 312-373 and 758;
g) the amino acid sequences of SEQ ID NO's: 436-497;
h) amino acid sequences that have at least 80% amino acid identity with at least one of the amino acid sequences of SEQ ID NO's: 436-497;
i) amino acid sequences that have 3, 2, or 1 amino acid difference with at least one of the amino acid sequences of SEQ ID NO's: 436-497;
or any suitable combination thereof.

26. Multivalent polypeptide, compound or construct according to claim 1, in which at least one of said stretches of amino acid residues (and/or CDR sequences) forms part of the antigen binding site for binding against RANK-L.

27. Multivalent polypeptide, compound or construct according to claim 1, wherein the at least two amino acid sequences and/or Nanobodies comprise two or more stretches of amino acid residues (and/or CDR sequences) chosen from the group consisting of:
a) the amino acid sequences of SEQ ID NO's: 188-249;
b) amino acid sequences that have at least 80% amino acid identity with at least one of the amino acid sequences of SEQ ID NO's: 188-249;
c) amino acid sequences that have 3, 2, or 1 amino acid difference with at least one of the amino acid sequences of SEQ ID NO's: 188-249;
d) the amino acid sequences of SEQ ID NO's: 312-373 and 758;
e) amino acid sequences that have at least 80% amino acid identity with at least one of the amino acid sequences of SEQ ID NO's: 312-373 and 758;
f) amino acid sequences that have 3, 2, or 1 amino acid difference with at least one of the amino acid sequences of SEQ ID NO's: 312-373 and 758;
g) the amino acid sequences of SEQ ID NO's: 436-497;
h) amino acid sequences that have at least 80% amino acid identity with at least one of the amino acid sequences of SEQ ID NO's: 436-497;
i) amino acid sequences that have 3, 2, or 1 amino acid difference with at least one of the amino acid sequences of SEQ ID NO's: 439-497;
such that (i) when the first stretch of amino acid residues corresponds to one of the amino acid sequences according to a), b) or c), the second stretch of amino acid residues corresponds to one of the amino acid sequences according to d), e), f), g), h) or i); (ii) when the first stretch of amino acid residues corresponds to one of the amino acid sequences according to d), e) or f), the second stretch of amino acid residues corresponds to one of the amino acid sequences according to a), b), c), g), h) or i); or (iii) when the first stretch of amino acid residues corresponds to one of the amino acid sequences according to g), h) or i), the second stretch of amino acid residues corresponds to one of the amino acid sequences according to a), b), c), d), e) or f).

28. Multivalent polypeptide, compound or construct according to claim 1, in which the at least two stretches of amino acid residues (and/or CDR sequences) form part of the antigen binding site for binding against RANK-L.

29. Multivalent polypeptide, compound or construct according to claim 1, wherein the at least two amino acid sequences and/or Nanobodies comprises three or more stretches of amino acid residues, in which the first stretch of amino acid residues is chosen from the group consisting of:
a) the amino acid sequences of SEQ ID NO's: 188-249;
b) amino acid sequences that have at least 80% amino acid identity with at least one of the amino acid sequences of SEQ ID NO's: 188-249;
c) amino acid sequences that have 3, 2, or 1 amino acid difference with at least one of the amino acid sequences of SEQ ID NO's: 188-249;
the second stretch of amino acid residues is chosen from the group consisting of:
d) the amino acid sequences of SEQ ID NO's: 312-373 and 758;
e) amino acid sequences that have at least 80% amino acid identity with at least one of the amino acid sequences of SEQ ID NO's: 312-373 and 758;
f) amino acid sequences that have 3, 2, or 1 amino acid difference with at least one of the amino acid sequences of SEQ ID NO's: 312-373 and 758;
and the third stretch of amino acid residues is chosen from the group consisting of:
g) the amino acid sequences of SEQ ID NO's: 436-497;
h) amino acid sequences that have at least 80% amino acid identity with at least one of the amino acid sequences of SEQ ID NO's: 436-497;
i) amino acid sequences that have 3, 2, or 1 amino acid difference with at least one of the amino acid sequences of SEQ ID NO's: 436-497.

30. Multivalent polypeptide, compound or construct according to claim 1, in which the at least three stretches of amino acid residues (and/or CDR sequences) form part of the antigen binding site for binding against RANK-L.

31. Multivalent polypeptide, compound or construct according to claim 1 comprising at least two amino acid sequences and/or Nanobodies in which the CDR sequences of said amino acid sequences and/or Nanobodies have at least 70% amino acid identity, preferably at least 80% amino acid identity, more preferably at least 90% amino acid identity, such as 95% amino acid identity or more or even essentially 100% amino acid identity with the CDR sequences of at least one of the amino acid sequences of SEQ ID NO's: 560-621.

32. Multivalent polypeptide, compound or construct according to claim 1 comprising at least two amino acid sequences and/or Nanobodies that cross-block the binding of at least one of the amino acid sequence of SEQ ID NO's: 560-621 and SEQ ID NO's: 730-757 and 765.

33. Multivalent polypeptide, compound or construct according to claim 1 comprising at least two amino acid sequences and/or Nanobodies that are cross-blocked from binding to RANK-L by at least one of the amino acid sequence of SEQ ID NO's: 560-621 and SEQ ID NO's: 730-757 and 765.

34. Multivalent polypeptide, compound or construct according to claim 1 wherein the ability of said amino acid sequences and/or Nanobodies to cross-block or to be cross-blocked is detected in a Biacore assay.

35. Multivalent polypeptide, compound or construct according to claim 1 wherein the ability of said amino acid sequences and/or Nanobodies to cross-block or to be cross-blocked is detected in an ELISA assay.

36. Multivalent polypeptide, compound or construct according to claim 1 comprising at least two Nanobodies that are chosen from the group consisting of SEQ ID NO's: 560-621 or from the group consisting of amino acid sequences that have more than 80%, preferably more than 90%, more preferably more than 95%, such as 99% or more sequence identity (as defined herein) with at least one of the amino acid sequences of SEQ ID NO's: 560-621.

37. Multivalent polypeptide, compound or construct according to claim 1 comprising at least two Nanobodies that are a humanized Nanobody that is chosen from the group consisting of SEQ ID NO's: 730-757 and 765 or from the group consisting of amino acid sequences that have more than 80%, preferably more than 90%, more preferably more than 95%, such as 99% or more sequence identity (as defined herein) with at least one of the amino acid sequences of SEQ ID NO's: 730-757 and 765.

38. Multivalent polypeptide, compound or construct according to claim 1 comprising at least two Nanobodies that are chosen from the group consisting of SEQ ID NO's: 560-621 or from the group consisting of SEQ ID NO's: 730-757 and 765.

39. Multivalent polypeptide, compound or construct according to claim 1, comprising or essentially consisting of an amino acid sequence chosen from SEQ ID NO's: 622-729, 759-762 and 766-773.

40. Multivalent polypeptide, compound or construct according to claim 1, which is a multispecific construct.

41. Multivalent polypeptide, compound or construct according to claim 1, which has an increased half-life, compared to the corresponding multivalent polypeptide, compound or construct according to claim 1, per se.

42. Multivalent polypeptide, compound or construct according to claim 1, in which one or more other binding units provide the polypeptide with increased half-life, compared to the corresponding multivalent polypeptide, compound or construct according to claim 1, per se.

43. Multivalent polypeptide, compound or construct according to claim 1, in which said one or more other binding units that provide the multivalent polypeptide, compound or construct with increased half-life is chosen from the group consisting of serum proteins or fragments thereof, binding units that can bind to serum proteins, an Fc portion, and small proteins or peptides that can bind to serum proteins.

44. Multivalent polypeptide, compound or construct according to claim 1, in which said one or more other binding units that provide the multivalent polypeptide, compound or construct with increased half-life is chosen from the group consisting of human serum albumin or fragments thereof.

45. Multivalent polypeptide, compound or construct according to claim 1, in which said one or more other binding units that provides the multivalent polypeptide, compound or construct with increased half-life is chosen from the group consisting of binding units that can bind to serum albumin (such as human serum albumin) or a serum immunoglobulin (such as IgG).

46. Multivalent polypeptide, compound or construct according to claim 1, in which said one or more other binding units that provides the multivalent polypeptide, compound or construct with increased half-life is chosen from the group consisting of domain antibodies, amino acid sequences that are suitable for use as a domain antibody, single domain antibodies, amino acid sequences that are suitable for use as a single domain antibody, “dAb”'s, amino acid sequences that are suitable for use as a dAb, or Nanobodies that can bind to serum albumin (such as human serum albumin) or a serum immunoglobulin (such as IgG).

47. Multivalent polypeptide, compound or construct according to claim 1, in which said one or more other binding units that provides the multivalent polypeptide, compound or construct with increased half-life is a Nanobody that can bind to serum albumin (such as human serum albumin) or a serum immunoglobulin (such as IgG).

48. Multivalent polypeptide, compound or construct according to claim 1, in which said one or more other binding units that provides the multivalent polypeptide, compound or construct with increased half-life is chosen from SEQ ID NO's: 790-791.

49. Multivalent polypeptide, compound or construct according to claim 1, that has a serum half-life that is at least 1.5 times, preferably at least 2 times, such as at least 5 times, for example at least 10 times or more than 20 times, greater than the half-life of the corresponding the multivalent polypeptide, compound or construct per se, respectively.

50. Multivalent polypeptide, compound or construct according to claim 1, that has a serum half-life that is increased with more than 1 hours, preferably more than 2 hours, more preferably more than 6 hours, such as more than 12 hours, or even more than 24, 48 or 72 hours, compared to the corresponding the multivalent polypeptide, compound or construct per se, respectively.

51. Multivalent polypeptide, compound or construct according to claim 1, that has a serum half-life in human of at least about 12 hours, preferably at least 24 hours, more preferably at least 48 hours, even more preferably at least 72 hours or more; for example, of at least 5 days (such as about 5 to 10 days), preferably at least 9 days (such as about 9 to 14 days), more preferably at least about 10 days (such as about 10 to 15 days), or at least about 11 days (such as about 11 to 16 days), more preferably at least about 12 days (such as about 12 to 18 days or more), or more than 14 days (such as about 14 to 19 days).

52. Multivalent polypeptide, compound or construct according to claim 1, comprising or essentially consisting of an amino acid sequence chosen from SEQ ID NO's: 694-729 and 759-760.

53. Nucleic acid or nucleotide sequence, that encodes a multivalent polypeptide, compound or construct according to claim 1.

54. Nucleic acid or nucleotide sequence according to claim 53, that is in the form of a genetic construct.

55. Host or host cell that expresses, or that under suitable circumstances is capable of expressing, a multivalent polypeptide, compound or construct according to claim 1.

56. Composition, comprising at least one multivalent polypeptide, compound or construct according to claim 1.

57. Composition according to claim 56, which is a pharmaceutical composition.

58. Composition according to claim 57, which is a pharmaceutical composition, that further comprises at least one pharmaceutically acceptable carrier, diluent or excipient and/or adjuvant, and that optionally comprises one or more further pharmaceutically active polypeptides and/or compounds.

59. Method for producing a multivalent polypeptide, compound or construct, that is such that it can be obtained by expression of a nucleic acid or nucleotide sequence encoding the same, said method at least comprising the steps of:
expressing, in a suitable host cell or host organism or in another suitable expression system, a nucleic acid or nucleotide sequence according to claim 53,
optionally followed by:
isolating and/or purifying the multivalent polypeptide, compound or construct, that is such that it can be obtained by expression of a nucleic acid or nucleotide sequence encoding the same, thus obtained.

60. Method for producing a multivalent polypeptide, compound or construct, that is such that it can be obtained by expression of a nucleic acid or nucleotide sequence encoding the same, said method at least comprising the steps of:
cultivating and/or maintaining a host or host cell according to claim 55 under conditions that are such that said host or host cell expresses and/or produces at least one multivalent polypeptide, compound or construct, that is such that it can be obtained by expression of a nucleic acid or nucleotide sequence encoding the same, optionally followed by:
isolating and/or purifying multivalent polypeptide, compound or construct, that is such that it can be obtained by expression of a nucleic acid or nucleotide sequence encoding the same, thus obtained.

61. Method for the prevention and/or treatment of at least one bone disease or disorder, said method comprising administering, to a subject in need thereof, a pharmaceutically active amount of at least one multivalent polypeptide, compound or construct according to claim 1.

62. Method for the prevention and/or treatment of at least one disease or disorder that is associated with RANK-L, with its biological or pharmacological activity, and/or with the biological pathways or signalling in which RANK-L is involved, said method comprising administering, to a subject in need thereof, a pharmaceutically active amount of at least one multivalent polypeptide, compound or construct according to claim 1.

63. Method for the prevention and/or treatment of at least one disease or disorder that can be prevented and/or treated by administering, to a subject in need thereof, an multivalent polypeptide, compound or construct according to claim 1, said method comprising administering, to a subject in need thereof, a pharmaceutically active amount of at least one multivalent polypeptide, compound or construct according to claim 1.

64. Method for immunotherapy, said method comprising administering, to a subject in need thereof, a pharmaceutically active amount of at least one multivalent polypeptide, compound or construct according to claim 1.

65. (canceled)

66. Multivalent polypeptide, compound or construct according to claim 1 for prevention and/or treatment of at least one bone disease or disorder.
